United States Patent Application Publication US 2025/0235397 A1 - sequence listing, part 9

SEQ ID NO: 12 - DNA, 4183453 bp, Bacillus licheniformis (residues 2,091,728-4,183,453 of 4,183,453)
  source 1..4183453: mol_type = genomic DNA
ggatgagaacaactccgatcttcatattaccagcacaaactttgacgagcctctggcattgcagaaaataaaagaacaccgctataccatcgcattccacggctattcgggcgaccgtccgcacacgcttgtgggaggaacggacagaaagctggcaaaagccatcgtcaaatctctgaaaaagtctgacttttccgcagaattggtcaaagtggacgggaaatttgccggaactgctgaggaaaacatcaataatgaaagccagacaggaatgagcgtgcagcttgaaatcagcacggctcagaggaaagagtttttcgaagacttttcctataaagagagggaagagacaaaaacgagaacattccgaaaatatgtcaaggcggtccgcaaggtgctgcaggacagatgctgaaaatggaaactcatgttattctgtgtatgaactgctaaaacatgaaggaggaataaaagaatggaacggaaagaccgcatcgttcaggaatttatgtcccaccgccttgtgacagaagaactcattcaaaaaattgatgaaaaacatctcgattacaaaccgactgaaacgtcgatgccagcaaaggaacttgtcacgcatatgctgcaatctttctatacctttgcttcggcggcaaaggaagggaacggagagccttttaaaaagaagcccgaagaaacagggacaagcttgagcgagcttgccaaaacgtatacagaaaaaacaaaaacgctgcttgaatcctttacggatgaagaattggatcgtgaagtcgatttgaccggcgtcttcggacgaaaagtagccggcgaacagctgctgcagctcgcgatcggacacgaaatacaccacaaaggcaatctgtttgtttatgtccgtgaaatgggacacacggatctgcctttgtatgtaaagattcattgatcctgagagccctccttgaaagaaaaccggttaaaaaggaatacgaaagcacccgggagtacacattatgagtaaaagctaaaggagggtgtcaggtgaatacgcagcgtgcccaggaaatcgtcgaatcacccgatatggttgatgttacttataacggcaggccgatttatattcagcgtgtcgacgaacaaaatgaaaccgcaagaatctttccgctcggccagccggagaacgagcaggaagtgccgctcgcaaatttgaaagaacattaaaaagaaaccccttctgaggaaggggttttgttttggatttgcctgccacacagccatcaaaaaaacacccgaaagaccgagtgtttaatttataattttcgcaagtcctcttactgccagcctcagcacataaaacaatggctcaagcaaatcgacgagataaagataatcccatttgtcatcattacgtttattttttttcttcaacgaatgtttctcctttcttgacggtaatggggttatttcatatacgagcatgcttcctataagtttcagattacgggtgaaatttgttttttctggaggcccattgtttttgaagccagctttttttataaagataagcgatcaattccatccacatcttaggaagcctctgcgggaaacggctttttttgtaaagggtttgataggctgtttttaagtcatcccactgcctgcattctttcgtctgcaaaaatctggcgacatcgatgactttgattgttccagacggcgtcagtatcaggtttcggaggtggatatcggatggattcaatcctttccgcctcgcatcgttcaatgcgcggtcgacctcgcagatcatgtcatcatcgatccgaatgcctttgtttaaacactcataaaaagtatatcctttaatatactccattaaaatatatgatggccctgtttcatatatatcaggataataattcgaatcagaaagctttttgtaaatctccgcttcccttgcggcgatgttcttaaattcgggaaaaaagactttaagagccatttccctgccgccctcttcagtcagcttaaaaacgtatgcgctcctgcctttcccgatcaattccaagtcatcgggtttttggataagcttgttgaacttttttttcgtatcatactttacggcttctgcataggtatgcgcctttttcacgctgagctcaccttctttttaagggctggtcaaacgaaaaactctctataatgttgtttatacatgagaatgggctgttttgcaccttaaatgcttttgagttcttcatattggtttgaaaatgtaacattcgtaaaccggttgtcatctaaaaagagatcgcttgcttttttagattaatttttaaaagcgttggtcaaactaaggatatgatcgttaaggcaaaaaagaaggtgatattgatgtacagccgaagcaagttcaaaatcggtttattgcttattggaagtctgctggccgcgctcagctttcacctggaggccttggccgaaaagccggctaaagttcaaatccagcttgaaaaggtttatctggacggagacgttggaatcgagaataaagtagaggccgctcgcacactggaagactttaaagctgcttataaagggtggcagctcatcgatcagaaaaaggggtttattctgtttcgtaaacaggtggacgacatttctcccctcagcaaaacaaacggttatatcggagtgactgaagatggcgtgatttcgacttttcacggtcgcccgggcatcttatcagaacccattcaatcgttttttcagattgatataaagcggctggaaagccggatggcggatgatctgcgcaaagggataccataccgcacgaaaaaggaatttgaacatgtcattgaagccgtaaaatcatccggaagccaacatcatgtagaagatatgaagacatgacgctgttatgtcttttttcagctgcagacagaagcttttttagcgaacatatgttaactttttcattctagctttgcctgttttgtgttacaatgaagagcagtcaaagaggtgaatgaacgttgatcgaattcgtaaaagggacgattgattatgtatcgccccaatatattgtcattgaaaacggcgggatcggctatcagatcttcacgccaaatccgtttatttataagaaaaacagcaaagaaacaatctatacataccattatgtaagagaagacacgaatgcgctgtacggcttttcgacaagggaagaaaaaatgctgtttacgaaaatgctgaatgttacggggatcggcccaaaaggagcgcttgcgatcctcgcttccggcgatccgggagcggtgattgaagcgatcgagaatgaggacgaagcatttctcgtcaaatttcccggcgtaggcaaaaaaacggcaaggcagatcatccttgacctgaaagggaagcttgcggatgccgttcctgaaatcgctgccgatctgtttaaccatgaagagcgggagcaaattcatgaggcggcaacggctcttgaggaagcgcttgaagcattgagggcgctcggctattccgatcgggaaattaaaaaagtccagcctcatttgaaaaaggaagaggcgctttcgacagatcaatacgttaaaaaagcattgcaaaaattgttaaagtaaggtgatatcatggatgagcggcttgtatcaagtgaactagacaaccatgaatcagcgattgagcaaagtctgcgtccgcaaagacttgctcagtatatcggccaggaaaaagtgaaagataacctcaaggttttcatcgaagctgcgaaaatgcgggaggaaacccttgaccatgtcttattgtacgggccgccgggattgggaaaaacgacgctcgccgcgatcatcgccaacgaaatgggagtcaatctcagaacgacgtcaggtccggcgatcgagcgccccggcgatttggcggcgatattaacggctctggagccaggtgacgttttatttatagacgagatccaccgcctgcaccgttcgatcgaagaggtgctgtatcctgcgatggaagatttctgccttgatatcgtgatcggcaaaggaccgtcggcacgttctgtgaggctcgatcttcctccttttaccctcgtcggcgcgaccacaagggttgggcttttaaccgcgcctctcagggacaggttcggcgttctgtcgaggcttgagtattacacgcgtgatgagctttcagaaatcgtgatcagaacggcagagctgtttgaagtcgacatcgattcgctctcggctctcgaaatcgcgagacggtcaagagggacgccgcggattgccaacaggcttttaaggagggtcagggattttgcccaggtgcttggaaacagctccatcacagaggaagtggcggttgatgcgcttgaacgcctccaggttgataaactcgggcttgaccatatcgaccgcaagcttttgatgggcatgatcgaaaaatttggcggcggccccgtcggcatcgatacgatttcggctactatcggtgaggagtctcacacgattgaggatgtgtatgagccgtatcttcttcaaatcggttttattcaaagaacgccgcgggggcgcatcgtaacccctgatgtttacagccactttaaaatggaggttccgaaccatgactgaatttccaaagattttaatggtgctgggcgccgtcatttttggcatcggtttattcatgcaagtcatcggcaggcttcccggcgacatttttgtgaaaaagggaaacgtgacgtttttctttccggttgttacatgcattgtcatcagcatcattctgtccgtcgtgttttcattcttcggacgaatgaaatgatgcgatattcaagtctatagatagagtaaggtgaaaaaagatgaaagtagaattattcgattttgacttgcctgaacgcctcatcgcacaggttcctttaaaagagcgggatgcgtccaggctgatggtgctggataaaaaaacaggggagatcactcacagcacgtttaagcacgtgattgattttctgaacgcgggcgattgcatcgttctgaacgatacgagggtgctgccggcccccttgtacggagtcaaggaagagacgggagcaaaggttgaagttcttctgttaaaacaggaggaaggggacgtctgggaaacgcttgtcaagcccgcaaagcgggtcaagcgcggaactgttctttcgttcggtgacggccgtctaacggcggtctgcacagaagagctcgagcacggcggcagaaaaattgaattccgctatgaagggattttttacgaggtgctcgaatcgctcggtgaaatgcctctgcctccttatattaaagaacagctcgatgacagggagcgctatcagacggtttactcaaagaaacaaggatcggcggctgcgccgacggccgggctgcattttacggaagagattctcgatgcgctcagggaaaaaggcgtgcatattgcgtttatcacccttcatgtcggtcttgggacattccggcctgtcagtgcggaaaatgtagaggaacacgacatgcatgccgagttttatgaaatgtcggaagaaacggcagcattgttaaaccgcgtcagacaggaaggcggaaggatcatttccgtcggcacgacatcgacgagaacgcttgagacaatcgcttccgagcatgacggccgcttccgggaagcgagcggctggacatcgatttttatctatcccggctacactttccgggcaatagacgggatgattaccaattttcatcttccgaaatcgtccctcattatgcttgtcagcgcgctcgcaggcagagagcatgtgctttccgcctaccggaccgcagtggaacacgaataccgcttcttcagctttggagacgccatgttgatcaaataaaattcaaaaagattggagggctcataatttgtcgcagcaaccgatacgctatgagttcataaaagcatgtaaacaaacaggagcaaggctggggagagtgcacaccccgcacggctcttttgaaacgccggtgtttatgcccgtaggaacgctcgccaccgttaaaacgatgtcgccggaagagctgaaagaaatgggtgcaggcattattttaagcaatacgtaccacctttggctgagaccgggccatgacatcgtcaaagaggcgggggggcttcatcagtttatgaattggaaccgcgccatcttgacggattcaggcggctttcaggtgttttccctgagcgagttccgcaaaatcgaagaggaaggcgttcatttccgcaatcatttaaacggagacaagctgtttttatctcctgaaaaagcgatggaaatccaaaacgccctcggctcggatattatgatggcgtttgacgaatgcccgccatacccggcagagtacgattatatgaagaagtctgttgaacgcacgagccgctgggcggaaaggtgcctgaaagctcacaatcgccctgacgagcaggggcttttcggaatcgttcaaggcggcgagtacgaaaatttgagaaaacaaagtgcgaaagacttgatttcattggatttcccgggatatgctataggtggactatccgttggagagccaaaagacgtgatgaaccgtgtgctggagtttacaactccgctgcttccagcggataaaccgcgctacttaatgggtgtcggttcaccggactcactgattgacggagccatccgcggagtggatatgttcgattgcgtgctgccgacaaggatagcgagaaacggtacgctcatgacgagcgaagggcgcctcgtcgtcaaaaatgcaaaatatgaaagagatttcaggccgattgatgagcagtgcgactgctatacgtgccgcaattactcgcgcgcttatatcagacatttaatccgctgcaacgaaacgtttggaattcgtttaacttcttatcataatctttattttctgttaaaattaatggggcaagtgagagatgccattcgtgaagatcgtttaggtgatttccgggaagagttttttgagcgctacggttttaataaaccaaatgctaaaagtttctgacacataaacgaagaaagcgataaagccatttgaaaggggtgaaaaaataatggagatgcttggaacattacttccgattattttaatgtttgcggttctttatttccttttgatccgtccgcagcaaaagcagcagaaggctgtccgccagatgcaggaggagctgaaaaaaggggataaggtcgtaacgatcggcggcctgcacggcatcgtggattcaattgacgaaagcaaggttgtcatcaaaacaggcgacaatacccgtctgacattcgaccgccgcgcaatcagagaggcgtcagcagaatagccgaaagatacataaacatcggaaatcgggctttcacacgacgtgacggcggcgctgttcggacggggacgtccgcgcgctataagcgccgttccttattgttttaggaagctgcatttgtttctgatgtgaatgacgaaagaagcctgcgggcactgggaaaagggagcggacatccgctccctttttgctgcctttatgcacggctcccctgcagattgaccccgaaaaccccgcccagcatgctgactcccaaaaagccggaatgatagaggagctgcttcaaattgaaggcctctccaaagccgagatattgaaacaaaagcaccgtaagggagaagcaaagcgctgtcaaccctccgctcagccaccccttttccttcgattttcctcccgcaataaaaccgccgatgaacaaggtaataaaagatatggcggtaatcaaccagctgaatgaactttcggttaatgatgtgaaggtaaggagcagcgaaataagcaggcttcctgcaaacatcaaagcgaaaatgaccaccaagctgtataaaatccctttgccgacttgttttggttcgttcatcacgatcctcctttcaaaatagacgggctcgtctttttaaatgtattctgcatgtttcgcaaatagactagctcccccgaccttttatacataaaagactcaaattaacaaaggctatgtttatgatcatgataggcggaaggaggcgggccgtaatggatgaaatcttagctcttacgtttcggacgatcgttttgtatttcatcatctttattttgtttcgcttgatggggaagagggaaataggcgagctgagcatactggatcttgtcgtttttatcatgatggccgaaatcgcggttttggctattgaaaatctcgatgaccaccttctccatacgatcatcccgattctcgttttgacgctgatccaggttatatttgcatatctgtcattgaaaaatcaaaaaatccgccggcttctcgatggaaaaccgacgattatcatagaccgcggaaaaattgatgaacacgccatgaggacacagcgctataattacgatgatttgatgacgcagctgagagataagaatgtggaacgaatcggggatgtttcatatgcgattttggagccgaccgggaagctttcagtgtttacaaaagacgggccgaacaaaatgatcgaactgccgttgattgttgacggagttgttcagaaagaagaattggaaaagatcgggaaggatcaagagtggcttgagcaaaagcttgaaaaaagaggacaccgcgatctttccaaaatttcttattgcacttacaataaaggttctttttttattgacataaaggatgaattcaagccttaaaaagaaagctatgaaatccagcggccgaacagcggaaaccgctggatttcttcctttttgaccagcttgaaggcaatcagaaggaaaacgtagagacagcttgtaaccgcgatacataaaagcaggcgcatcggctcggactgggctaaaaaaaggtgttctttcatcagaaggctgccccaccctgatatcaaaatgacgccgaaggatacgatatattctttcaggttaatgctgatgggaagcactttgctgacggttgcagcgtgcagcaaagtgacaaggatgattcccgtcaagatcgcaagcgcagcccccataatgccaagcgaaggccgtgaagcgagaacaaaaatgagaccggttttcacaacggcgccgaccaagctgttcatcattgccgcgccggccaggtttaaagcctgcaggacggcctgcagggggccttggaaatagtagaacaaaaagaatggagccatgattttgacgtaaatggcggcatttgacgacccgtacatcacgctgaccagctcatcagcatacgaaaataaaatgaccgctgatattccgccgcttaataggcaaagcctcatcgcctgctcaagcctgtattccacaacctgcatttttttctgctcgattccttcgctgatggcgggaacgagcgcggtagacagcgaatatgtgataaagctcgggagggtgagaagcgtcagggcaaagccggtcaactccccgtactggctcgttgcggcggaagcggcgacccctgctatcgcaaggctttgcgctacgacaatcggctcaaaaaaccatgacaggttcccgataaaacggctgcccgtcgttgggagcgagacgctcatcagctcgaaaaaagtcgttcgccccgctttaagcgattggaaaaaacgttttctgatgcggattttctttttgtatttaaaggcgacgaacaaataaaggagtgaagccaattcgccaaacacggaagacagcatggcgcccgctgctgcatactcgatgccgagcggaaggaatgctgtcgtgcagacggcgacgagcgatatccggacaatttgttcgagaacctgggacacggcaagcggccgcatattttgcttcccttgaaaatagcccctcagcacgctggaaacggcaatgatcggcacgaccggcgtaaccgccaaaagcggataaagcgttcttttgtctgtgagcagcgtatcggccatcagcggggcgtaaatgagaaacaccggagtgatgatggcgctgagcgtcccggtgatcgcaagagacatcactaaaatctgttttgtcttcctatggtctcggcgcgcttccgcttcagcgaccagcttgctgatggcgaccgggaggccgaactgggtgagggtgacggccagaaaaaaagtcggggccgccatcatgtaaagcccgacgccttcaccaccgatgaaccttgcgatgacaatccggttgataaagccgagcattctcgtaatcaaacccgccgctattaaaatgagcgttccttttaaaaacgtctgcttcgtcatttctagagtcccctgccttctcaaacaacctttaatcatatacaataagatatgcgcatacatcgtccaagcatgacaagtctctctgaaaaaatgtgaaaggagcgtggctttggcatgggcaaacatccggctgatctgtacaaggatcatttaaaaccctttcttcgcagcaagacggaagagtttagaatactcggttatgacgatattgaaatagaggaattgtggtcatacttattgaataagaaatggaagaaccggaaggatgttcaaattcaccagctggccggtgacattttatctgtgaaaattggcgaatttatgaactatgcaaccgtagaatcgtttaaaacgtctaatttactcgacagcaaagaagggcaggatatgctcgatgagctgctgaggtagccgttgattttggttgatttaaggaggaaatacataatgaaaaaaggacgcttgattgcgtttttccttaccgttctcttgatcggtacaggactgggaatgttcacgaagccggctgcagacaacatcagcctcggccttgatcttcagggcggttttgaggttctgtatgaagtccagcctgccaaacagggcgacaaaattgacagggatgccctcatcagcacggttgaagcgctgaaccgccgggcgaatgtattaggcgtcagcgagccgaacattcaaattgaaggaaacaaccggatcagggttcagcttgccggcgtcgacaaccagaacagggcgcgggaaatcttatcgacacaggctcaacttacgttcagggatacgaatgacaaagagcttttgaacggtgcggatcttgtcgaaaacggcgccaaacagtcgttcaagcaggatacgaatgagccgatcgtgacgatcaagctgaaggatgccgataaattcggcgaagtgacgaagaaagtgctcgatatgaagccgaacaaccagctcgtcatctggcttgattacaaaaaaggcgactcttttaaaaaggaatcgcaaaaagcggatcataaatacatttccgctccgaatgtcagccaggtgctgaatacgtcagacgtgatgattgaaggcaactttacgattcaggaagcaaaagacatggcgagcattttaaatgcgggagctcttcctgtcaaactcgttgaaaagtattcgacatccgtcggagcgcagtttggggagcaggctttgaatgataccgtgtttgcgggaatcattggtattgctattattttcttatttatgcttctttactatcgcttgcctggttttattgcggtcattacgctttcggtctacatctacattacactgcagatattcgactggatgaatgcggttctgacccttccggggatcgcggctcttatattgggcgtcgggatggcggttgacgccaacatcattacgtatgaacgcataaaagaagagctgaagctcggcaaatcggtccgttcggcttttaaagcaggaaacagaagatcgtttgcaacgatttttgatgccaatattacgacgatgcttgccggaatcgtgcttttcatatttggtacaagctctgtcaaaggcttcgcgaccatgctgatcctatccattttgacaagctttattacagctgtcttcctgtcgcgcttcctgctcggcctgctggtcgaaagccgctggcttgaccggaaaaaaggctggtttggggtgcgcaaaaaagacattttggatatcagaaagacagacgaaaatacggagcctccgaacccgttttccaaatgggatttcgtcgggaagcgcaaatggttctttgcattttcgggcgttcttctggccgctggtcttatcgtcttgcttgtgtttaagctgaacctcggcatcgatttctcaagcggatcgagaatcgaagttcaaagcgatcataagctgacaacccagcagctcgaaaaggactttgaacaagtcgggcttgatcctgactcgatcgttctttcaggcgaaaaaaatgatcatggcgtcgccaggtttgtcggcgtgccgaatcagaaaaagatcgctgaagtgaaagattattttaaagacaaatacggaagcgaaccaaatgtcagcaccgtatcgcctaccgtcggcaaggagctggcgagaaatgcgctttatgcggtgatcatcgcgtcaatcgggctcattttgtatgtctcgatccgctttgaatacaagatggcgattgcggctattacttcattgctgtatgacgcgtttttcatcattgccgtcttcagcctgacaaggcttgaggttgatgttactttcattgctgccgtgctgacgatcatcggctattcgataaatgatacaattgtaacgtttgacaggatcagggagcatatgaaaaagcgcaaaccgaaaaccttcagcgacttgtcgcatattgtgaatttgagcttgcagcagacgttcacgcgttcgattaatacggtgctgactgtcgtcattgtcgtcattgcacttctcatcttcggcgctgcatcgatttcgaacttctctgttgcgctgttggtcggacttttgagcggagtatattcatcactctacatcgcagctcaactatggcttgtctggaaagggcgcgaactgaaaaagccgaagcgcaagcctgcagaagaataaataatggactgcccgcactgccgggcggtctttttttgatttgaatagaaaaaaagttgttttggcggctttctatcgatcttctttttgtttaaaattggagcagagcgggaaaataacgctagaaaacgacgcgaatggagagagtatctcatgaacaaacaatggacgttaattgctgcacttatttttacattaattgttgctgttttcgcggtcattaatgttgaaccggtgaaggttgattttctttttggtacagcagaatggcctttgatcctggtgattttggtgtcggtattgatgggggcgcttatcatcggctcggccggcgctttccagatcatgcggctgaaaaaagagctcaagacgctcaagaaagaagaacgggcaaagcatcctgaactcgaagccgaaccggcggcgcccgaaaatcagaaagactagaaagattgtacgaaataaattgaatcccctcatgccgctctagtataatagtgtggttgaggggtgaatttatgttagcgtcaaaaatgcgttgggacgtgcaaacgcccgacaaagaaaaggtggagcagctcgccggaaggttaggcattactccccttgccgcctcattgcttgtcatgagaggttacgatacagccgacaaagcatcttcatttttatatggcaatgatgcacgttttcacgatccttatctgctgaaagatatggaaaaagctgtacggcgaatcaaacaggcaatttcagatcaagaaaagattatgatttacggcgattatgatgcggacggtgtgacaagcacgactgtccttttgcaaatgttgaaaaaatgttcagcacaagccgatttttatatacctgaccgctttaaagaagggtacggtccgaatgaagcggcctttcgcgggatcaaagaatcaggctattcattgatcattacagttgacacaggcattgccggcgttcatgaagctgaagtcgctaaagagctcggcatcgacctgatcattacggatcaccatgagccgggtcccgttttgccggatgcttatgcgatcattcatccgaaacagccgggctgcggctatccatttaaagagcttgccggcgtcggtgtggcatttaagcttgcccatgccttgaacggagagcttccggaagatttgctcgacctttgtgcgatcggtacgattgccgatcttgtgccgcttcatgatgaaaacaggcagatagccaagcgcggcatggaacagttcaggaaaacgaagcgtccaggattaaaagcgctggcgaaaattgccggagcggagatacataacgcggatgaagagaccatcggttttcaaatcgcgccccgcttaaacgcggtcggcagaattgaacaggctgacccggccgtttacctcctgaacacagaagacgaaagagaagcggaagagcttgctgaggacatcaacgccttgaacaaggagcgccaaaaaatcgtcaatcagatgacagaggaagccgttcagatgatcgaggaggaaggccttgaccagcctgtgatcgtcgtagcgcggccgggctggaatcctggcgtcgtgggaatcgtggcttcaaagcttgtcgagcggttttacaggcccgccatcgtccttggcgtcgatgaagaaaaaggaattgccaaaggatctgcgcgcagcatcaaaggatttgatttatttcaaaacctttccgagtgccgggatattctcccgcacttcggcggccacccgatggcagccggaatgacgctcaacctggaagacgtttcggctctgagggagagaatcaaccgtcaggctgaagcggttctgaccgaggcagattttatccccgtccaagacgtcgatttgtgctgccggctcgaagatatatcggttgacagcattgccgaaatgaacttgctggcgccgttcggcacgggaaacccgaagccgttcgttcttgtcagcgacgtaaaaattgatgacgccagaaaaatcggcgccaacaagaatcatttgaagcttgtgcttgcagacgacgggaacaagctcgattgcatcggattttataaaggcgatatcgaagaaggaatcgttcctggagcaaagatctcgattgtcggggaactgtcgattaacgaatggaataacagaaaaaaaccgcagctgatgatcaaagatgcggccgtcaatgaatggcagctgtttgatctgcggggaaaacggtcatgggaagaaaaaatattgaagctggaccctgcgaaacgggcgtgcatctgcttccgcgaggaaacaaaagcaaagctggcagggacaggccttgaagaagagctgaccgtcatcagcggccctgaagatgcagagcggctcgaccttgagagccgttatgcggtatttatagatattccgcagtcgctcgacatctttgatcatgtaataaacggcaaaaagctggagcgcatttatctgattttttatcaatcagacgaacattttttctcaacattcccaacaagggaatattttaaatggtactatgctttcctcctgaaaagaggttcttttgacttgccgaaatacggcggagagcttgccagacataaaggctggacaaaagacacaattgattttatgacaaaggtgttttttgagctcggttttgttacaatagagaatggtgttttatctgttgtttatcatgccgaaaagcgcgatttaacagattctgaaacctaccgggaaaaacagcgcctgattgaattggagcaaaagctcatttattcttcggcggatgagcttaaacagtggctggataagcggatggcggaaaaagccggcgcttataaagtatgaggaggacatgaagacagatggatttgaagaagtatgtgacaattgtgccggattacccgaaggaaggcgtacaatttaaagatattacaacattgatggacaaaggcgacgtctatcgctacgcgacagatcaaattgtaacgtatgcgaaggaaaaagagatcgatctcgtcgtgggacctgaagcgagaggatttatcatcggctgccctgtcgcatatgcgcttggggtagggtttgcgcctgtccgcaaagaaggcaaactgccgcgcgaagtcatcaaagtcgactacggattggaatatggaaaagatgtcctgaccatccataaagatgccattaaaccggggcagcgcgtcttgatcactgacgacctgcttgcaaccggcgggacgattgaagcaacgatcaagcttgttgaagagctcggcggcgtcgtggccggaatcgctttcctgatcgaactgacatatcttgaaggaagaaataaactggacggatatgatattttaaccttgatgcaatactaaacaaattttatactataaaaagcactcataaaaagcgggtgctttttttcctattcataaaagtattccggggccggcaaaagcccttttgaatttcttctctttacatctgtgacatttttcttgataataattacaatacagttttcaattataaaaaaggtgattccatggcgaacgaacaagtattaaccgctgagcaagtcattgagaaggcgaaaagttacctttccgatgaacatgttgcttttataaaaaaggcttatcagtacgcggaagacgcacatcgcgaacaataccgcaaatcgggcgagccgtatattatccatccgatccaggtcgcgggaatcctcgtcgatttagaaatggaccccgccacaatagcgggaggatttctccatgatgtggtggaagatacgagcgtaacgcttgaagatttaaaggaagcattcaacgaagaagttgcgatgcttgtcgacggcgtcacgaagcttgggaaaattaaatataaatcacaggaagaacagcaggcagaaaatcatcggaaaatgtttgtggctatggctcaggacatccgcgtcattttgatcaagctggcggaccgccttcacaacatgagaaccctgaagcatctgccgcaggaaaagcagcgcagaatttcaaatgagacgcttgaaatatttgctccgctggctcatcgccttgggatttcaaaaataaagtgggagcttgaggataccgctttacggtatttaaatccgcagcaatattaccggatcgtcaatttgatgaagaaaaagcgggccgaaagggaattgtacgtcgaagaggtcgtaaacgaagtgaaaagccgcgtcgaagaggtcaatattaaagcggacttttccggccggccgaagcatatttacagcatctacagaaaaatggcgatgcaaaacaagcaattcaacgaaatttacgacttgctcgcagtccggatcctcgtcaacagcatcaaggactgctacgcggttttaggcatcattcatacgtgctggaagccgatgccgggcagatttaaagactatatcgcaatgccgaagccgaacatgtaccaatcgctccacaccacggtcatcggtccgaagggcgatccgctggaagtccagatcaggacgtttgaaatgcatgaaattgcggagtacggaatcgctgcccactgggcttacaaagaaggcaaaaatgccaatgaagattcaagctttgataaaaagctttcctggttccgcgaaattttggaatttcaaaatgagtcgagcgatgccgaagaatttatggaatctcttaaaatcgatttgttttccgacatggtattcgtttttacgccgaaaggggacgtcatcgaattgccgtcaggatccgtgccgatcgacttttcgtaccgaatccattcagaaataggcaataaaacgatcggggccaaagtaaacggcaaaatggtcacccttgattacaagctgcgcacaggggatatcgtagaaattctgacgtccaagcattcgtacggtccgagtcaggactggatcaaccttgcgcagacatctcaagcgaagcataaaatccgtcagttctttaaaaagcagcgcagagaggaaaatgtcgaaaaaggcagagaactggttgaaaaagaaattaaaaacctggactttgaagtgaaggacgtcttaacagccgagaatctgcagaatgtcgccgacaaattcaactttgccaatgaagaagacatgtatgccgctgtcggctataacggcattacagccgctcaagttgcaaaccgccttacggaaaaagaacggaagatcagagatcaggaagaacaggtgaaaagcgttcaggacgtaacgcctgaagtgaaaccttaccaagggaagaaacgcgaagcgggtgttcgcgtcaaaggcgttgacaaccttttgatcaggctgtcaaaatgctgcaaccctgttccgggagatccgatcgtcggattcattacaaaaggcaggggcgtatccgtccatcgcgaggactgcccgaatgttttaacaaatgaagcgctcgaccggctcattcaagtagaatgggagcatgaaccgcagacccagcggagaaaagaatataacgtcgaaattgagattctcggctatgaccgccgcggtcttcttaatgaagttctacaggcagttaatgagacaaaaacaaatatttcatctgtttcaggtaaatcggaccgcaataaagtggcgacgatccatatggcgatcttcattcaaaatattaaccatttgcataaagtagttgaacggattaagcagatcaaagatatttactccgtgcgcagggtgatgaattaggaggaaaagcgtcatgagattagttgttcagcgcgtcacagatgcaagcgtttcggtaggaggcgagactgtcggcgaaatcggcctcggcttgatggtgcttgtcggcgtgacgcacgaagatacgagcgaggatgccgcatatttggcggagaagcttgtcaatctgcgaatttttgaggatgaaggcgaaaagatgaacctgtcgcttttagatgtcgggggctccgttttatcggtttctcagtttaccttgtacggcgacacgaaaaaaggaagacggccgaattttacaaaagcggcaaagcccgatcaggcgcttcaattgtacgaagagtggaacagcatgcttcgcgcaaaaggcgtcactgtcgaaacgggaagatttggagaaatgatggatgtcaagctgacaaattcgggtcccgtcacgtttattatggattcgaaagcataaaaagctcccgattgggagctttttaaattagtcaaaatagttttctagaccgcttctgatgccgtctgtcactctttctctgtaagcgttcgtgctgactaccgcttcttcttgaggatggctcaagtagccgagttcaaacaatgcggcgggctgtttattttctcttaatacgaagtagtccccgaatagtacgccgcggcttggcagaggcgagtgcctttcgatctcggactgcacgtctgctgcgagcttccggtctttggacgggctgtagtaataggccgtatttcccctgacggacgcatttggaaagctatcataatgaatgctgataaaagcgtcggcgtttcggtaatgagaggtcgcgacccgcgactgaaggctgacgaaagaatcgtcattccgcgtcatatagacgttgacgccatcggctctcagtttcgcggcaagaagcgttgccgttttgatggtcagccgtttttcgagcgtcccccgcgttccgattgtcccgctgtcatgtcctccatgtccggcatcgatgacaaccgttttatttttgattgtgcctcccgagcttgaccgctttgccaaaggcggtgctgcgcttttcgaatctccggctgagcctgcctggtcaacagtctgaacgacccagcttgcgacataagcggaatcgccgtttgacagtttgatttcataccagtctccttttgtagagacgatcgggtaagactcgccttttcccgtgcgtttgacgatcgctgaggatgtcgaaggcccgcttctaacatttgtgccttcatacacgatggtggcctgccgttttgcttcggagctgctgcttgtttccgaggttccgctgttctgtttgtttccttcgagaatatagtggcttgcggcccagcctttttgtccattaaattcgatttcataccagccgtgctgtttgtttaaaatcgtcacacttgcattccgttggagcgtggcaataatccggccttgatgggaagctgtgctcctgacatttaaggtggatacgccgaccgttcccgattttgatgatgaagcatgtgatgaagacgattgagactgtttcgcgcctgaaccttgattgacataatctgaatagacccagcctgtgatgttctgataggaaatctttatccattttccgtcggtctttagcaggtcagcctgttctccttcagggaatacgccttggacttcatatgaagtgccggggccttttctgattctcaagtttgcttcggaggatgtgacttttcccgatgcggaatcagatccgctggagacttggctctttttcttgatcagccaggatacgacccagcctttttgcccgccgttcagctggatttgcacccaatccccgcgttcttcaagaatcggatagctttcattcctgctgacgacgctgacgatttcgtggctcagtccaggcccgcttctgacattgatttcatcggtggcaatcacggcttccccgatggctgcagaagctgtgtttgacgatgtataaaaggctgcttgtgctgccagcatcatcgataggatcaataccgctctttttttcatattgattcccatctcctcctttcggtaaaaaacttggaacactacttcttcttctatatcgtatattccttgccgtttttttaataaaatgaaaatgatttgtttatactatagaaaaaagatatcaaaaggatgttgctgcatgaggtataatcaaagaatgggcagggcgatccatgagcaagatgcgaatctgcatctaaaggagcatgcggacccggagcgcgccggcttcatggaagaaacggccactgagctggggctcacgtccaaagaatcaattcagaataaaaagaaccgcaaatagggttgacatgcaaacgtaacactcgtattataatataaattagtgtacatatgagctgaactgaagatggagaatagtaggcaagagtacgtgaaaagagaggaaccgccctgggctgaaagcggtctgcacggtatcttgaccgaatgaacactccgaaggtttcccgctgaaagcccggcataacatgcgagcaattaggcggcggacgtgaacctgcgttaaaggcatgagcgggaacggatttatcgttccaactagggtggcaccacgggtataactctcgtccctactattggttttatagtagattcgggggtttttttatttccataaatgagaaaagcatttaagtcatgaggaggattttaaaaatgggatttaatattccaaggggaacacaagatattctccccggagaatcggaacgctggcaatatgtcgaaaagattgcgagagaaacgtgtcatgcgtatcaatataaagaaatccggacgcctatttttgaacatacagaactattttcccgcggggtgggagaatcgaccgatattgtgcaaaaagaaatgtatacattcgcagacaaaaaaggaagaagcctgacgcttcgtcctgaaggcactgcatctgcagtacgctcttttgtggaaaacaaactttttgcaaatccggttcagccgacgaagctttactacattggaccgatgttccgctatgaaaggccgcagacgggccgctaccgccaattttatcaattcggcatcgaagcgatcggttcgaacgatccggcgattgacgcggaggtcattgctttggcgatgagtgtataccggaaagcgggtctcagcaacctgaagcttgtcattaacagcctcggcgacaaagagagccgaaccgctcacagagaagcgctgatccgccactttgagccgcggatcgacgagttttgttcagactgtcaaaaacggctccggcaaaacccgctgcggattctggactgcaaaaaagacagggatcatgaactgctgaaaacggctccgtcgattcttgactacttaaatgaagaatctaaagcatattttgcaaaggtacagcaatatctgacggacatcggcattgcatttgaggtcgatccgaatctggtgagagggcttgactattacaatcacacggcctttgaaatcatgagcaatgccgaaggcttcggagcgattacgacgcttgccggcggggggcgctatgacggccttaccgaggagttcggcggtccgaaagcgccgggcatcggctttgcgatgagcatcgaacgccttctcgccgcactggatgctgaaaatgtaaaagtcggagcggatgaaggcattgactgctatatcgtgacacttggcgacaaagccaaagactattccgtatcccttctctataaactgagagaagcggggatatccgcggaaatcgactatgaacagaaaaaaatgaaaggccagtttaaatccgccgaccgtctcaatgcgaaatatatcgctgttttgggcgaggatgaactgaaccaaaatcaaattaatgtcaaagatgggaaaacaggagatcaacaggccatcggccttgatgatttcatccgttttttgaaaacaaacactgaaagttaaaggagaggaccgctttgtttggacgaacgtattattgtggcgaaataacggagaaggcgatcggagaaaccgtcgttttaaaaggatgggttcaaaaaagacgcgatctcggaggcttgatttttattgatttgagagatcgtaccggcattgtgcaggtcgtatttaatccagacgtttccaaagacgccctggaaacagctgaaagcatccgcagcgaatatgtgcttgacattacaggcaaagtcgttgcccgtgaagaagcaacagtcaatccaaacttgaagaccggaaggatcgaaattcaggcggaatcggtcgatgtgctgagtgcggccaaaacgcctccttttgcgatcagcgaccaggctgcagaagtatctgaagacatcagattaaagcaccgctatctcgacttgcgccgtccggagatgttcaactccctgaaaatgcgccataacgtcacaaaagctgtccgccgctttttggatgacaacggctttcttgatattgaaacgcctgttttaacaaaaagcacgcctgaaggcgcgcgcgactatcttgtaccgagccgggtgcatgaaggggaattttatgcgcttccgcaatctccgcaaatctttaagcagctcttgatggtgtcagggtttgaccgctattatcaaatcgcccgctgcttcagggatgaggacctgcgcgccgaccgtcagcctgagtttacgcaaatcgatatcgaaatgtcatttatgagccaggaagacatcatgaagctctcagaagaaatgatggcgcatgtgatgcgtgaaacgcacggcattgaaatctcgcttccgcttcctagaatgtcgtatgaggatgcaatgaaccgatacggctcagacaaaccggatacgcgcttcggcatgctgttgacggatgtgtcagaagcagtgaaggattcggactttaaagtgttcgcttcggctgtggcgaacggcggagcggtcaaggcgatcaatgtaaaaggagccgctgcaaactactctcgcaaagatatcgatgcgcttggagagttcgctgcaaactatggagcaaaagggctggcttggctgaaaacagaagcggatggacttaaaggaccgattgcgaagttttttgccggcgaaaaacaggaggcacttgttcaggcgcttgacgccgcagacggggatctgcttctctttgtggccgacaagctcgaagtcgccaatgacgcgctgggagcgcttcgtttaaagcttggtaaagagctgaacctgatcgatgaaagcttgtttaacttcttatgggttgtcgactggccgcttcttgagtacgatgctgaggaaggccgctactatgccgcacaccacccgttcacaatgcctgtcagagaggatctcaagctgatcgagacgaatccgcaggacatgaaagcgcaggcttacgaccttgtcctaaacggctatgaacttggcggcggctcgatccgtatttttgaaaaagacgttcaggagaaaatgtttggccttctcggcttttcagaagaagaagcgaaggagcaattcgggttcctgctcgaggcttttgattacggggctcctccgcatggcggaattgcgctcggtcttgacaggctggtgatgctgctcagcggccgtacgaatttgagggatacgatcgcatttccgaaaacggccagcgcaagctgcctgatgaccgaagcgccaagcgaggtcgacaatgctcagcttgatgagctgcaccttgaaatcaaacgcaaaattcgacagtaaattgtaaaatatacggctgtacatcccattgaaaatcaaagggacgtatgatatcatttttaacaaataaagtcctgatgtgtttgttgtacacctagttttgaccgaacatttttttacttgggagttcgatgtttccgaatggagcaaatgcctcttatcactcgtgtgctcaggaggacttgcaaagtttggaacagaacacccacctgccgagagcgggatcaaaacgaaggaatacgacaacggcacaatcgggacttttttgtgcttgaaaaggccgtttttcggccatacataggataatctatgaggcgaagcgaaaaaatatgacggcaaaatgaaatagaccgcttgtttaatcacccgattatgataagatactatcggtaactgtttataaagatggagtgagattcttgttacatcagttttcacgcaacgaattagcgattggaaaagaaggtttaaatattttaaaaaacagcacggtcgccgttttgggcgtcggcggggtcggttctttcgccgcggaagcgctcgcccgttcaggtgtcggcagaatcgtgatggtcgataaagacgatgttgacatcacgaatgtcaaccgtcagctgcctgctttactttcaacggtcggacagccgaaagttgacttaatgaaagcgagaatcgccgatattaatccggaatgcgacgtcatcgctttaaaaatgttctataccgaagagacgtatgaacagttttttgcatatgaaccggattatgtaatcgacgcttcagacacgattcattataaaatccacttaatgaaagagtgcctgaagcgcggcatcaacatcatctcaagcatgggagcggccaataaaacagatccgacaaggtttcaagtggccgatatttcaaaaacccacaccgatccgattgcaaaagtcatccggacgaggcttcgcaaggaaggcattacgaaaggcattaaagtcgtcttttctgacgaaagtccgatcgtgatccgtgaagacgtacgccaagtcgtcggaaatgatgaagcgaaaatccgcaaagcgcagatgccgccgtcttcaaatgcttttgttccgtcagtcgcaggcttgattatgggcggccatgtgatcatggagcttttgaaagatattccgatcaaaagggtgaaagataagtaatacaaaaacgacagcagaggtgctgtcgtttttggtttcaagacaaacggcctccttaatgaaaagaaacaggccgtttattatttttgtttcatcagcttgtcgtatacttgtttcagtgcgagttcaaattttcccgtctgcttcggctgatagtaaactttgtttttcagcggatcaggcaggtactgctgtttgacccagccgttctcgtaatcgtgcggatatttgtattccacacctctgccaagctcagcggctcctttgtaatgggcgtcctttaaatggttcggcacatcgccgatctttccggagcggacgtctgacagcgcttcgtcaactgcaaggatcgccgagttcgatttaggagacaggcagagctcaatcacggcgttggccagcggaatcctcgcttccggaaatccgattcgttccgccgtttgaatggcttgaagcgttcttccaccagcctgcggactcgccagcccgacatcctcataggcgataacaagcagcctccgtgcaaggctttccaaatcccccgcttcaataagccttgccatgtagtgcagtgcagcattgacatcagagcctctgattgatttttggaaggcggaaatgacatcataatgcgcgtctccatctttgtcatggacaaagctttttttctgcaggcattcttctgcgatttccaatgtaatgcgtatcgctccctcactgttttcctttgtggacaatacggcaagttcgagcgcattcaaagctgagcggacatctccgccgcagccgcgggccaaatggtcaagcgcctcatcatcgacggcaacgtcatacgaaccgaggcctctgtgtttatcttcaagcgcccgtttaatggccgttttgatttgttcagggtctaacggatgcagctcgaaaatctgcgttctgcttctgatcgccggattgatcgcatggtacgggttggctgtcgtcgccccgatcatgataatcatgccgttttccaaatacggaaggagaaagtcctgcttgcctttgtcaagccggtgcacctcatcaaggattaagataacctgccccgacatttttgcttcggcggcaatggcttccatatcctttttattattgatgactgcgttcagctttcggaaagcgatgctcgtgctgccggcaatcgccgtggcgatcgacgttttgccgatgcccggggggccgtacagaatcatcgatgaaaggtgtttggcctgcaccatccgatgaatgatctttccttccccgaccaggtgatcctggccgagaacctcttcgatttttgtagggcgcattcgaaatgcgagtggtttcatgattgatctctcccgaatgtattctttttatagagtaacggaaaaaagacgattagaaaagaaatgaatatggcaagctgaatataaggccgaaaatgaaagtttatataaagtgtgctataataacctgtaatctatcagacggacaaggccggaaccttgtcccaaccgagtttttaatatataacagacgcttgaatccgacagccggcttcctgccggtgtttcaatcttggagatcggcttatgccttatgaggatgcaccgcggcgctttctgcgcctgaacgggactcggcttaagggcttttgtttgctgtgaggaacgccgagcacctttgttctggtgtgaaaaggactcggctaagggctttcacatcctgtgaaaaaagccgagtaccttcgtcctggtgtgaaaggagactcggctaaggtctttcgcgtcctgcgaaaaacgccgagtaccttcgtcctgaaggcatgatttattataggttagaggtgtttattttgaaaatatcaactaaaggcagatacgggctgacgattatgattgagcttgcgaaaaagcatggggaaggcccgacttctttgaaaagtattgctcagacaaacgatttatcggaacattatttggaacagcttgtttcacctttgcggaacgccgggcttgtgaaaagcattcgcggggcctacggcggctacattcttggtgaggagcctgcggcgattacggcgggcgatatcattcgcgtcctggaagggccgatcagcccggtggaagtgcttgaaaatgaggagccggcaaagcgcgaactgtggatcaagattcgcgatgctgtcaaggaagtgctggactccacgacgcttgaagacttggccagctatacagagggcgagcaggaagcgtatatgttttacatttaagatcgaggtgtaatggtaggatggaacggatttacttagaccatgcagcgacttctccgactgacccccgggtagtggaaaaaatgctgccttacttaacggaaaacttcggaaacccttcaagcattcattcctttggaagggagagccggaaatggcttgacagcacgagggagctgatcgctcaggaaatcggagcgcatcccaatgaaatcgtttttacgagcgggggaaccgaagccgacaatatggcgattctcggaagcgcgctggcgagagagaagcagggccgccacatcatcacgacaaagatcgagcaccatgccgttctgcatacgtgcaacaggcttgaagaaatgggatttgacgtcacatatctagacgtcgacgaaagcggaagaatctccgccgagcaggtgaaagacgcactgcgagacgataccatcctggtgacggttatgtatgggaacaatgaagtgggaacgattcagccgatagatgagatcggcgatctgctaaaggaccatcccgcgctgtttcatacagatgcggttcaagccttcggttttttgccgattgatgtgcaaaaaagccgtatcgatatgatgtctgtctccggacataaacttaacgggccgaagggaacaggctttttatacgtcaacgaaaacgtgaagctcagccagcttcttttcggaggagagcaggaacgcaaacgccgggcgggaacggaaaatgtcccgggaatcgcggggctcggtgaagctgttttgctctcgggtcgggaaagagaagaaaaatcggatctttaccgccggtttaaagacatcatcacccgtacgctggaagcagaaggcgtctcattcgatgtgaacggcagcaggcggcacagtctgccgcatattttgaatctgtatttcccgggagtatctgttgaatcgctgctcgtcaatctcgatatggcgggaatcgcagtatcgagcggatcggcgtgcacggccgggtctgtgcttccgtctcatgttctctccgccatgtttggcgaagaagacgatcggctcacgtcatccgtccggatcagcttcggctttggcaatacagaggaacaggttgagcgcgccgcgaaagaacttgctaaagttgttaagcgtctgtcataaatttcgggaagccatgctccgagctaaagattcgcatcctgcccgaaaatgatgatatgatctgaaaggacaagtttttgaattgatttattggagttgatgaaaatggcgaagcggcctgaagatacacgggtggtcgtcggaatgtccggaggcgttgattcctctgtggcggctttgcttttgaaagagcagggctatgatgtcatcggaattttcatgaaaaactgggatgacacagatgagaacggtttttgcacggccacggaagattacgaagatgttataaaggtatgtaatcaaatcgggattccgtattatgcggtgaattttgaaaagcagtattgggaaaaggtttttcaatatttccttgatgaatataaagagggcagaacgccgaacccagatgtgatgtgcaacaaagagattaaattcaaagcctttttggagcatgctttgtcgcttggagccgattatttggccaccggccactatgcgcgggtcgaccatacggacgggcgtgttaaaatgctcagagggctggacgaaaataaagatcagacctattttcttaaccagctgacagaagagcagttaagcaaagtactgtttccgatcggcgagcttcaaaaaagccgcgtcagggaaatcgcaaaagaagcggggcttgcgacagctgccaaaaaagacagcacaggcatctgctttatcggagaacggaacttcaaaacgtttctcagccagtaccttccagcacagccgggagatatgcggacgatggaaggcgaactcaaaggccgccacgacggtttaatgtactatacgatcggacaaaggcacggcctcggcatcggcggaagcggagacccttggtttgtcgtcggaaaagacctcgaaaaaaacattttgtatgttgaccaaggattcgacaatccgcttcttttctccgataagatcacggcgacaaacgtaagctttgtacatgacggcatcttcggcggcgaagacgagcttgcctgcacggccaaattccgctatcgccaagccgatcacgaagtcactgtcagaatgaccgggacagatgaagcagaggtcgtctttaaagagccggtccgcgccgttacgccgggacaagcggttgtcttttacagaggcgaagaatgcctcggcggcggaacgattgatgatgtgtttaaagacggacaacaactttggtatgtataaaaccggggctctggataacaccccggagcttctcgaacggctgccggcaatgtcggcggcctttttaaaatagttcgtgaaagggagagggcttttggataacaatcaaattggaatagatgctatgcaaaaaggcgactttgaaaaagccgcagaagcctttacaaaggcaattgatgaaaacagcggcgatccggtgccttatatcaactttgccaatctgctttccgcagtcggcgaactggacagggcgcttaagttttacgaccgggcggctgctttggacgagaaagcgggagcagcttattatggagccgggaatgtctatgtcatgaaagaacggtatcaagaagcgaaggacatgtttgaaaaggcgcatcggacgggcatggaaaacagcgacttatattatatgctcgggacgacgcttatgaagcttgagcagccgaagctcgcgatgccgtatttgcaaagggccgctgagctgaacgatgcggatgtcgaagcccgttttcaatacgcgatgtgccttgccaatgaagggatgctggacgaagcgatcacggagttttcaaatgtaactgagcgcgacccgtcccatgcagatgctttttataatttaggcgttgcctatgcgtttaaggaagatcgggaaacagcgcttgccatgctgaacaaagcgctggacattcagccggaccatatgctcagcattcgcgccaagcagcttttggaagaagcttgattgatcaagggccgttatgacggattttgaatggagagggggagaacagtgatgcagcgccataacccggaccaaattgaaatggaagaagcttcatttgtaaaaggaacggttgcggctgtcatttatcataatgaaacaaacctgtataccgtattaaaagtaaaagtggaagaaacatcggagtcttttgaagacaaaaccgtttctgtcaccggttactttcctttgatccatgaagatgatatctacactttttacggaaaaaccgcctcccatccgaaatttggcctgcaatttcaagcggatcattttaaaaaagaagtaccgacaacgaaagaaggcgtgatccaatacttggccagcgatttatttgaaggaatcggcaagaaaacggccgaggaaattgttaataagcttggggaaggtgcgatcaacaaaattttaagcgacggggccgtcctgtatgatgttccgaagctctccaaaaaaaaggcggataagcttgccgctgccctgcagcagcatcaggggctcgaacagattatgatctccctgagcgaattcggcttcggcccccagctgtccatgaaaatttatcaggcgtacgaagcggaaacgctcgataaaatccgcgaaaatccgtaccagcttgtcaaagatgttgaaggaatcggctttatcaaagcagacgaactgggcggcagaatggggatctcaggcaaacatgaagagcggatcaaagcggcgattttatacacggttgaagcgacatgccttcaagaagggcatacgtacatagaaacgagacagctcatcatcgagacgcaaaagctgttaaaccagtcagcaggcgatgaaaaagtaaccgagatggatgtggcggacgcgatcatttccttaggggagcaaaaagagctgttcattgaagatgaaaggtgttattatccgtccctttactacgctgaacaaagctttgccaaaagggtgcagaaaatcgccggacagaccgaatacgatgaccagtttcccgaatcggaattcctgctcgctttaggggagcttgaagaacggatgaaagtgcagtacgcgccaagccaaaaagaagccatacaaaaagcgctgatgtcgccgatgctgcttttgacgggcggaccgggaaccgggaaaacgaccgtcatcaggggaatcgtcgagttgtacagcgagctgcacggcttaagcttaaatccggctgattacaaaaaggatgaaacgtttccgtttgtgctggcagcaccgaccggccgggccgctaagcggatgagcgagtcgaccgggctgccggccgtaacgattcacaggcttctcggctggaatggagccgaaggatttacgcacgatgaagacaatccgattgaaggacggctgctcatcattgatgaaacgagcatgcttgatatatggctcgccaaccaattgttcaaggcgattcccgaccggatacaggtgattatggtcggagacgaagaccagcttccgtccgtcggtcccggacaggtgctaagggatcttttggcatcgaatgtcatttcttctgtcagattaaccgatatttacaggcaggctgaaggctcttcaatcgttgaactggcgcatgaaatgaaacaaggaaagcttccggaaaacttgaccgcgccgacaaaagaccgttcttttattcgctgccgccagcagcagatcaaagaagtcgtcgaaaaagtcgtcaaaaacgcgctgcaaaaaggatattcggccagggatattcagattttggctccgatgtacaggggagcagccggtatcaacgagttaaacgcgcttttgcagggcatcctgaatcccccgaagccgaaaggcagggaaatgaagtacggcgatgttgtgtaccgtaccggcgataaagtgctccagctcgtcaaccagccggagcacaacgtgtttaacggtgacatgggtgagatcgtctcgattttttatgcaaaagaaaatacggaaaaagaagatatggccgtcatctcttttgacgggaatgaaattacctttacaaaaaaagattttaaccaatttacgcacgcctattgctgttcgatccacaaatcgcagggcagcgaatttccgatcgtcatccttccggtcgtcaaaagctattaccggatgctgagaaggaacttgctttacacggccatcacaagaagcaagaaattcctgattttgtgcggggaagaagaagcccttgaatggggcgtgaaaaataaggaatcatctgaaaggcagacatcgcttaaaagaaggcttcagcaggcggcgcatgaagaggatgaagagctcatagcgctgcaaaaagagctgcctttcagcgtctatgacgccaatatcgggatggaaggcattacaccttttgattttatggaaaaggaagcagaataagtgtttttcatggaatccatttcatcgtatgagtcgtgtcgcaacagcagatcataagagtgttcgtaaaaaggtggttgatcacactttgagaacatgcaatgagctggaaggactcaatgtttacgacagacaatcttccctcccgcttggggtggtaacagatatctgtttttcccatgaagggacatgtctcggattgattatggaagagaagcggcgcttttacaatccccgttcgcttcttccgcttcccgctgtcaccgaaatcggacgtggcggcgtatacgttgatttcaccgaattcaagccgatgcaagttccgaagcaaagtctttcttatgaccagatgaaacaaaaaatggtcaaaaacggagcaggagacacgctgggcatgctggaagatgtatacttttcttccgacacgggcataatcgtagcatatgaactatcagacggtttttttgccgatttgtcaggcgacaaaaagcagattcactcatctggggaaccgcttgaagtaggcagaagcacaatcgtcttgaacgaataagaggtgtgtgttcaaatgctcgtttgcccgaattgcaaaagcaaaaacatcggcaaaatcggtgtaaatcaatattactgctggggatgctttattgagctgaccctttcaaaaggaaaaatttcgactcatcaagtcgaagaggacggaacattgagcagcctggacgatctgttttcagatgacgaacgaacgattaacctttgaatggaggttagaaagttgaatcgtacaatgacttctcttatttctttaggagccggggctttgatgtactacatggcgtctcagaacgatatgatgaacaagcgaaacatgagaaagctgagaagacgcgtcatgaaaatgttttaagcagaagggatacccttaaaagggtgtcccttttttcttcgggaataattacaagcagaaatcaaaagctaacaaggggtgaaaaaaatgctgaaaaaaccgctgcagcttttaatgtgggtttcgatcttcatgcttttgctattaaccgtctatatctttttgcagctgagaatgatttgggagcctgtctgcgtgctgctgaagtcgattctgatcccgcttgtaattgcggtttttatcacctatctgcttttgcctgtcgttgaaaagatacaccaggccggcgtgccgagaacattgagtattttgctgatttattttttgttttttgccggtctcggctacgctttttacaaaggggtgccgattctcattaaacagctgacagagctatcagagggaattccgtttcttgccgcatcttacgaaagcatgctggatcagctgcatcatcatacagacggctggcccgacggtatgcacgacaggatcgacaggttcgtcaatcagacggaagaattcgtagcaagctgggtggaacggacgatcagaagcatccggttcgtttttgattatatgctcgtggcggcgattattccttttttagtattctacatggtgaaagatattgatacgatgaagaaggcggtatggtatttgacgccttcttcatggaggtcgagaggcagcgaattcatccgcgatgtcgatgattctcttggagactacatcagaggacagctttttgtctgtcttgtcatcggcttgggagcgagcctgtcattttggttttttgacctgccctatccgctgatcctcggccttgtcatcggcgcgacaaatgtcatcccgtatttcggtcccgtcatcggcgcgattcccgccgtcatggtagccgccgctttatcgacgaggctcgtttttgtggtgatcattacgattttggtgctgcagtttatcgaaggcaatattctcggccctcttgtcgtcggcaaaagcctgcatatgcatcccgtcgtcattatgcttggattgctggcgggcggggagcttgccggcatcatcggcatgattctggctgtgcctgtcatggccgttatcaaagtgatgttcgtccattttttagcggcaagaaaagcgtgagcggcagaagtttgacataacggcttccgttgtctataatttcgaaatagacatacatacgtatctcgtttgacggatccgagtatactgaagccctgtttgatagagagaagctccattgcggtgaaagagctttaacagaagatcagtagaagctaatcctgagtgcaggcgaaaacctgccgtcttcatccggcgttattcggatatcaaggtgatgggcgttttgttacgcccataatcagggtggtaccgcgagaggagctctcgtccctgtgtaaacgttgtttgcatagggcgggggctttttaatttgcatgtgcatcattaaaggaggaaaaaaataatgaagacattaacatccgcacaagtgcgccaaatgtttttagatttttttaaagaaaaagggcatgccgttgaaccgagcgcctctcttattccgcatgaagatccctccctgctttggatcaacagcggagtcgcgacgctgaaaaaatattttgacggacgggttgtgccggagaatccgcgcatctgcaacgctcaaaaatcaatcaggacgaacgatattgaaaatgtcgggaaaacagcccgacaccatacgttctttgaaatgctcggaaacttttcgatcggcgattatttcaaagaagaagcgatcgagtgggcatgggaatttttaaccgatcaaaaatggatcggcttcgatcccgaacgcctgtcagtcacggtccatccggaagatgacgaagcgtatgaattatggtcaaaaaaaatcggcgttcctgaggaacggatcatcagactggaaggaaacttctgggatatcggtgaaggcccgagcggaccgaataccgaaattttctatgaccgcggtgaagattatggaaatgacccgtctgatccggaactttacccgggcggggagaacgagcgttaccttgaagtatggaaccttgtgttctccgagttcaaccacaatcctgacggaacatacacaccgcttccgaagaaaaacatcgatacggggatggggcttgaacggatggtatctgttattcaagatgccaagacgaactatgatacggatttgtttatgccgatcatcaaggcgacagaagccatttcaggagaaaagtacggcacatctgctgaaaaagatacggcatttaaggttgtggctgaccatattcgaacggctgcgtttgcggtcggcgacggagcgcttccgtcaaacgaggggcgcggctatgtcatcagaaggctgcttcgccgcgctgtccgctatgcgaagtccatcaatatcaaccgtccgtttatgtatgagctcgtgccggtagttgccgacatcatggccgcattctacggcgaagtcaaagaaaaagcggactttatcgcgaaagtcatcaaaacagaggaagaacgcttccatgaaacattgcacgagggcttggcgattctctcagaagtgattcaaaaggaaaaagcaaaaggaaaccgcatcatttccggggaagatgtctttaaactgtatgatacgtatggattccctgttgaactgaccgaagaatacgccgaagatgaaggcatggaagtcgatcatgacggatttgagcgcgagatggacaagcagcgcgaacgggcccggcaggcgcgccaggacgtcggcagcatgcaggttcaaggcggcgctctccgcgatatcatgacaaaaagcgaattcatcggctattccgatatcaaaacggaaacgaaaatcgccgagcttcttcaagacggggaacttgccgacctcgttcaagaaggcaagaaagttcagtttatcctggaaaaaaccccgttctatgctgaaagcggcggacaaatcggtgatagaggctgggttaaaagcggggatgccgcgattcgcgtcacagacgttaaaaaagcgccgaacggccagaacctgcatgaagggatcgtggaaagcggcgcaattaaaagaggcatgagcgtaaccgcagaagtcacggagcggctcagaaaagacatcgtcaaaaaccataccgcgacacatttgcttcatcaggcgctgaaagatgtgctcggtacgcatgtcaaccaggccggctcgctagtcactgacagccgtctgcgctttgacttctctcactttggacaggtgactaaggaagaactcgaacaaatagaaacaaaagtgaacgagaaaatttgggcatcgattcctgtgcaaatcgacttaaaaccgattgatgaagcgaaagcgatgggagccatggcgctgtttggcgaaaaatacggagacatcgtccgcgtcgttcaagtcggcgactacagcatcgagctgtgcggaggctgccacgtgagaaacacggctgaaatcggtctctttaagatcgtgtccgaatcaggcatcggggctggcacccgcagaatcgaagcggtaactgggcagggcgcttatgaagagatgaacgccaaactggagcttctcgagcaggcggcagaagtcctgaaaaccaatgtgaaggaagtgccgaaacggatcgaagcgctccagtctgatctgaaagaagctcagagagaaaacgaatctttattggcgaaactgggaaataaagaagccggagagattttagaaaaagtaaaagaaattgacggaatccaactgctcgcagaaaaagtgaatgccaaagatatgaatcacctgcgcacaatggttgacgatctgaaggcgaaactgggctcagccgtcatcgttctcggggcggttcaaaacgaaaaagtgaatatttccgccggagttacaaaagatttaatagagcggggtttccacgcaggcaagcttgtcaagcaagtcgcagaagcatgcggaggcggcggaggcggccgtccggacatggcgcaggcgggaggaaaacagcctgagcggcttgctgaagcattagcatctgcggaagaatgggtaaaatccgttttataaatagccgttgtggtgtagaatggtgattagaaggtaatcaggctgaaactttgcctgcgaatttgggaaagaggtgcaaaacggtgagctcatttgataagacgatgaaatttaacttttccgacgattcgatggaaaccaatgtaaatgaagtgctgataaccgtccatgatgcgcttcaggaaaaaggctacaacccgatcaaccaaattgtcggatacctgctatcaggagatcccgcttacattccaaggcatcgagatgcacgtaacctgattcggaaaatagaaagagacgagataatcgaagaattggttaaatcgtacttagaacagcataaagaggcgtaaacaagcatgcgaatattaggtctggatttaggttcgaaaacgctcggcgtagcgctgagcgatgaaatgggctggacggctcaagggatagaaacgattaaaatcgacgaggcgggcggtgactacggcttgaaccgcctcgccgaattgacgaaagactatgtcattgacaagattgtactcggttttcccaaaaacatgaatggaaccgtcggcccgaggggggaggcgagccagaagttcgcggaagtgcttgaagaaacgtttcaagttcccgtcgtgctttgggacgagcgcctctcgacaatggcggccgaaagaatgctgatatcagcagatgtaagcaggcagaaaagaaaaaaagtaatagataaaatggcggccgtgatgatccttcaaggatatctcgacagcctaaactcatgaggtgaataagatggaacacggagaaaaaaacattacgattgtagacgacaaaggaaacgaacagctgtgtgaagtgctcttcacatttgacagcgatcagtttaacaagtcatacgtgctttattatccggttgaagcacaggatgaggaagagatcgagatccatgcttcaagcttcgtaccgaatgaagccggagaagacggcgaactgatgccgattgaaacagaagaagagtgggatatgatcgaagagacgctgaacacgtttttagcggatgaagacgaagaagaataaagcagcggctgaaccgcttgacaaaatcctaaaacttaaaccgttttaggattttgtcattttttaaatgggcatctgcaatcatttgcgccctgctgccgacaggcggctttttttattagaacattttgtaataaattgccgaatgataacgaatcatgtagtatatacatgggaggagaggaggacaccaatgtttgaagatcagacaaagaaaccgtttataaaaagactccttaaacataaaataaagttttggctgactgtggtcgcggttctgctgattttaaccgcaggcgctgtttcgctctacgtcaaatcggcgctcgaaccggtcgataaaaataatgcaaaaacggtcagcgtctatattccggaaggatcgaccgttacgtccatcgccgccaaactgaaaaaagaggacctaattaaaaacgaaaaagtatttatcgcttatgtgaaatttaaaaatgcctccggctttcaagcggggaactttcagctcagccagtcgatggatgcggccggcatggtcaaaaagctgacgagcgcttcgcatgtaccggcatttaaaattaccgttcctgaaggaagacagctccaggaaatcgcagctatcatcgccggacaaaccaactactcggcagcggacattatgaaaaagctggatgaccgcgaattcatcagccgattaaaacagaagtatccgaaactgatcaccgatgacgtgctaaacaagaatatcaagcatccgcttgaaggatacctgtatcctgcgacatatccgttttacgaccctgagacgaagctggacgcaatcatcgaagcgatgatcaaacaaacagatcagctggctgaaaagtatgaaaagcagatgaaagacaaaaagatgtccgtccacaaagccttgacgatggcttcgttaattgaagaagaagctaccgaaaaagcggaccggcacaaaatctcaagcgtcttttacaaccgcatcagcaaaaacatgccattgcaaacggatccgaccgttttatacgcgcttggggagcataaaaaccgtgtcatgtacaaagaccttgaagcggattccccgtataatacgtacaaacatgccggtctaccgcctgggccgattgctaacgcgggagagagctcctgggaagcggcattaaatccagagcgaacagactatgtttatttccttgcaaagaaaaatggggaagtcgtctttacaaaaacgcttgaagaacacaataaagcaaaagcaaaatacattacgaacacacaggacgaggaaaaaggagagtaaaaattactctccttttattcgcaaatacaacggttttatgataaaatatatcgggttgtttattgagaaaagacagtcgactgctttaggagagtgctgcacatctgacctaaggctcttttttatgaaagggaggccatctgcccgtgaagattggacacgaagaattgaccggctatcttgaaaagctgctgaagccgcggccggctgaaattatgaaactggaggcctatgccgaagagcatggcgtgcccattatggaaccgacaggaatcgaagtgctcctgcagcttctttcattcaaaaatccgaaaaaaattcttgaaatcggtaccgccatcggctattcggcgattcggatggcgcttgcccttcccgaagccgagatttttacaatcgagcgcgatgaggacaggtatcgggaagcgctgaaaaacatccggtcattccagcttgaaaacagaattcacgtgttcttcggcgatgcgctcagcgagtctgaccccgttcaatcgatggctccctatgatgcgctgtttatcgatgccgcaaaaggccagtatcagaagtttttcagtatatatgaaaaaatgcttgccgatgacggcatcatttttacggacaatgtccttttcaaaggccttgtcgcatcagaatacaatcaaatcgaaagcaagcgcatcaaaaagcttgtatcgaaaatagatcattacaatcattggctgatggagcatcctgactaccacacggcgatcctgcctgtgggcgacggattggccgtcagtcaaaaaagaggtgaacggatatgaaaaagcctgaactgcttgtcacgccgacttctgtttcggatattaagcctttggcagaggcgggcgccgatgcgtttatcatcggtgaacaaaggtacggtctgcgtttagccggggagttttccagagaagaagtaaaagaagccatcattcaggctcatgaaaaaggcgcaaaagtatatgttgctgtgaacgcgatttttcacaatgaccgggttccggaactgaatgactacctttcattcttggacgaggcaggcgcggatgcggttgtcttcggcgatcccgccgtactgatggctgcacgggaatcagcgccgaacatgaagcttcactggaatacggaaacgaccgcaaccaatcattattcctgcaactattgggggcgcaagggcgcgaagcgcgcggtgcttgcaagagagctcaacatggacagtatcgttgagattaaagagaaagcagaagtcgagattgaaattcaggttcacggcatgacatgcatgttccagtcaaagcgctccctgatcggcaactattttgaataccagggaaaagtcatggatatcgaaggcaagaaaaaagaaaaaggcatgtatctccatgataaagaacgcggaaataaatatccgattttcgaagacgaaaacggcacgcacatcatgagtccgaatgacgtctgcatcattgatgagcttgaagatttaatcgatgccggcatcgattcatttaaaatcgacggaattttaaaatcggtcgaatacatgactgaagtaacggccatgtaccgcgaagccatcgacctttgcatcgcagacagggaagcatatgaagacaagaaagaacaatggatcgagcggatcgaacagctgcagcctgcaaaccgcagcattgataccggattctttttcaaagaaacagtatactaaaaggagggatagccatgtctgcagtaaaagataaaatttccaaaatcgttaatggaaaacgcgtcattacgaaaaagccagaacttcttgctccggcggggaatttggaaaaactgaaaatcgctgtccactatggagcagacgctgtatttatcggcggacgtgaatatggactccgctcaaacgcagataacttttcaattgaagaaatggctgaaggtgtcgaattcgcgaaaaaatacggcgcaagaatttatgtcacgacaaacatttttgcgcatgaagaaaatatcgacggactggaagactatttgcgcgatctcgagggagcaggcgtgtcaggcattatcgtcgctgatcccctgatcattgaaacgtgccgcagggttgcgccgaagctggaagtgcatttgagcacacagcagtccctttcaaactggaaagccgttcagttctggaaggaagaaggccttgagcgggttgtgctcgcacgtgaaacgagcgcacttgaaatcagggaaatgaaagaaaaagtggatattgaaatcgaaacgtttattcacggtgcgatgtgtatcgcttattccggccgctgcgtgctcagcaaccatatgacggcaagggactccaaccgcggaggctgctgccagtcatgccgctgggactatgatttgtatcagacggacgggacgaatgcactgccgctatatgaagaaggcgatgctccatttgcgatgagcccgaaagatctgaagctggtcgaatcgataccgcaaatgattgaaatgggcatcgacagcctgaaaatcgaaggccggatgaaatcgatccactacattgcgacagtcgtcagtgtgtacagaaaagtgatcgatgcttattgcgctgatcctgaaaacttcgtcatcaaagaagaatggctgaaagaactggacaaatgcgccaatagagacacggcgcctgctttctttgaaggaacgccaggatatgaagagcagatgttcggcgtccacggcaaaaagacaacatacgactttgtcggacttgtccttgactatgatgaagagacaaaaatggtcacgctccagcagcggaacttctttaaatccggagatgaagtcgaatttttcggtccggaaatcgaaaatttcacatgcaaaattgacacgatttgggacgaaaaaggcaatgtgcttgacgcagcccgccatcccctgcagatcgtcaaatttagagtggacaacaagatttatcctagcaacatgatgagaaaggggcagtaatggcatggggaaaaaaccggtagttatcggcatagcgggaggctccggatcaggaaaaacgagcgtcaccagatccatttatgaacagtttaaaggtcattcgatcttaatgctcgaacaggatttatattataaagatcagagccatctgccgtttgaagagcggctgaatacgaactacgaccatccgcttgcatttgacaatgactatttgatcgagcatttaaacgaattgctcgcgtacaggccgatcaaaaagccgatttacgattacaagctgcatacgcgttcagaggaagtcgtgcacgtcgatccgaaagatgttattattttggaaggaatccttgttctcgaggatgaaaggctccgcgacttaatggacatcaagctgtatgtcgatacggacgccgacctgcggatcatcagaaggatgctcagagacataaaagaaagaggacgttcgatcgattctgtcatcgagcagtacatctcagtcgtcagaccgatgcataaccagtttgtcgaaccgacgaaacgctatgccgatatcattattccggagggcggccaaaaccgcgtcgccatcgacctgatggtaacaaaaatacaaactattcttgaacaaaacgcgattttataataacatagcatagacaaacacaactctgaccatattatgtatagaaattgaagggttctcatcctgagcccttctttaactgtataagcaccatttaccggagccttccatccggtttatatgatactttacaaatatgggagagaagaaggggacaagggttgtcctcattcttgtatattcaagtctatactctcacatacaagtgatgaggaaccaactagaaggagtgaaggaacatggcacaagagaaagtatttcctatgacagaaacgggaaagaaaaaactggaagaagaacttgagtatttgaaaacggttaaacgtaaagaagttgttgaacgtattaaagtggcaagaagcttcggagacctttccgaaaactccgaatacgattcagcaaaagaagaacaagcttttgtagaagggcgcatcacaacccttgacaatatgatccgcaacgcaaagatcatcgaagatgacggtgcaaactcagacatcgtcagccttggaaaaaccgttacatttacggagcttcctgacggtgaagaagaatcttatacgattgtgggcagcgcggaagccgatccgtttgaaggaaaaatctcgaacgattccccaatcgcgaaaagccttctcggcaagcaggttggagacgaagtaaccgttcaaacacctggcggcgaaatgcttgtaaaaattgtgaaaatttcataaaatttgtttagcaaacgatgacctcgtccacaatgtggatgaggtgtttttataatgaaatggcaaaagcgtatgaagtgggtatcgattatcatttcggctgctcttttatttctgctgatcaggctggctgaaattcaactgttttttaccgagtccttttctaaacggaatgtgaacttaatccaggaaagcgtcaaacagcgcacggaggaagttcggatttcagacgggagaggatcttttttagatcggaacggcgaacatttgtccgtcagccaaaaaccggccatcgtcttgttcccttttttaaaaaatcagccgtggccggccaaagaagcagccgaaattttaaacatgacagaagatgagcttggaagcaagctggaccatgcaaaaaaacccgtgattctcacaaaacatgacggagcgtccgtttcaaagacggctctcgaaaaaatcaataaactgaaatatccgggcgtttacggcgtatacatagaagaaacagaaaagaacaggctggcttcgcatacgctcggtatgaccaatcaagacccggacctcctcagacgcaaatatcccgataaagagggcctctccatcagcacgaaaatcggcaccttcggcatggagcggacgtttgatgaattcctgctgcctgaacaagacacaaaactgttgtatcatgtggacggattgggaaaccctttgttcggcatggacgtcaaatatacagcagacgcaaatccgttttacccgctgcaagtcaaaacaacgctcgataaaaaggttcagcaggcaatggaagatgtacttgatgaccatcagctcgataaaggcggggcggtcctgcttgacatcgagacgaacggcgtggtggcgattgcgagcaagcccgacttaaacatggctgcgcaaaaaacaaggcagaactatatgctgactccggtatatcccggctcggtttttaaaaccgtgattgccgctgcagcgattgaaaacggcttggatcatccgtctaaaacctttaactgcaatttgaacctgtacggtgaggccggagaggacaaaggaaagctcagcctggaagacagttttgcggaaagctgcaactacacgtttacaaatcttgccggacagctcgtagaaaaaaacagctccgtgatcgaagatactgctgcaaagcttgggctgaccggacgggtcggctgggaaggaaagctgtatcatgaagatgagttcagacagttttatcatgaaactgcaggatcaatctggggggatgaaaaggacaaaaaagttaaaaaagctgtagcccagaccgctatcggccaaaagaatgtgaagctgactccgttggaaatcgtcaacatgatggcgaccatcgcaagaggcggagagaaaaaacaagtcaagatcgcagaccagatcgaatataaaaacggcacattgatgacggcttttaaagatcacgagctcccaggagagaaaatcgaccagtatacagcgcaaaagctgcaaaaactgctcagaaaagttgtcacatctgaaaaggggacgggccggcgcttcagcgatcttccgtacgatgtagcgggaaaatcgggcacagcgcagacaggcaggacgacagatgacaaaaaaacgctctatcataaatggtttgccggttattttccggcggacaagccgaaatatgcgctcgtcgtcgtccatatggatacgccggatagcaaggctgcgacaaatgccgtattttatgatattgttaaaaaagtatatgaaattgaaaagaaccagacatagaagaatgcctcaggtgatgataaaataggaagcgaggcaagagggaaaaaggagtgcaatgaacttgagcgaaacaagggaatctcgttttgaaaatcgtgataagcgcaggaaagcgaatcttgtgcttaacattttaataggcatcgtattggtattaatcgttgtcgttgccagcagtctgatgatgaacagtccgaaggagcaggcgcagcaagatgtctcgaaaaacgattctgaacagacgacagaagcgcctgcttccgacaataagaaacaaacatctgatgaagatgtaaaagatgaggacaaaggaaaaagcgattctgccgataaagaagacagcgattccgactcagacaaggataaagaatctgcttcagacgaggacaagtcaacatcagatgatccgtttgaaggagccgaagtgacagaaggcggttcaagcgccaatgttgaaaaaacgatcatcaatcctgactgggagcctgtcggcacacaacagagcggacagcataccgcaacatatgattcctcttcacaagactggaaggaaatgcttgaagccatttcatatgcgacaggggtttctaaggataacatgacggtgatctggctcggaaacaacggcagcccgcaagatgcgaaaggaaccattcgggcgaaggacactggcgtcaaataccaggtagccattacttgggttgacggaaaaggctggaagccgacaaaagttgaacaattgaaataaagaaaaaagcggccggttgctaaaaccgggcgctttttttatgattcggctttaaaatgaacgactgcgctgtagtggatccgtccgtcaataaccgccgtatggtgggaaaccgaatggaccctcagcaaaatcgcctggttgttttcaatctgctgactgatctttttttcaagctcctctaagctcagtgcctcaaaaaactcaattttatctttgatcagatcgaggccgaagttcataaaccaatcctccattcgtttcaagtcattttttattaaagcagagaagcggccgggtgacaagggaaatataaccaagccttttttgtacccaaaacgaatgacttgtggtaggataagaactaatcaatcgaataaatcatactatacttataggaattgtaaaaatagatggagagtgacgacaaaatgggaagagagttcattcctttatttgagaactgggcaaattcttatgatgatacagtagttggccgcgatcttcaatacaaagaagtgtttcgcgactacgacggcattttggatgatgtcgtcagccgctcggggcataaagttcttgaattcggcgtcggcacaggcaatctgactgcaaaattgctggcggccggaaaggcagtcaccggtgtagagccttcaaaagcgatgagggaaattgccgaggcaaagctgccggagaatgcagtgatcgttgacggagactttcttgactttccggaccctccgttttctcccgacacgattgtcagttcttatgcgtttcaccatctgacaaacgaagagaagcgggaagctgtgaagcgatatggaaaaatgctcgggaagcatggtaaaatagtgtttgctgataccgtcttcaaggatcgggaagccttctctgccgctgttaaaaaagcgaaggaaaacgggtttctgcaattggcggaagaccttgaaacggaacattatccgacgatttcggagatggaaacgatctttacctcagaacatttcagtatcgcctttcaaaagcataatgattttgtctgggtaatggaagcggcaaaattgtaatttgaagggaagttttaagatatgaaaatcgcagttatcggagcaatggaagaagaagtcacgattttgcgaagcaaactcgaacagacgaaccgggaagtcatcgcaaactgtgaatttaccagcgggttttatgaaggaaaagaggtcgtgcttttaaagtccggcatcggcaaagtcaatgcagccatgagcacgacgattctgcttgaccgctttaaaccggacgttgtcatcaacaccggatcagccggcggctttcatcattcgcttaatgtcggagacatcgtcatctcgaccgaagtccgccatcacgatgtcgatgtcacggcatttgattatgaatatggacaggttccgaatctgccggctgcatacaaagccgacagtgcattgatccaagcggcggaagacgaagcgtctgaactggggcacattcaggttgtcaaaggaacgatagcaacaggcgattcctttatgagcgatcctgaccgcgtcgcattcatccgcggcaagtttgaagacctttacgcggttgaaatggaagctgcggctgtcgcgcaggtttcttatcaatttaatacgccgtttgttgtcatcagggcgctctcagacatcgccggaaaagaatctgaaatttcatttgaccaatttttggaacaggctgccaagcattcgacagatcttgtgcttcgcatgattaaaagaatcaattaaaacagggggaggctccccctctgttttgcacctcttgaaggaggaaggaacatgaatgtgatcaaggatatcaccgaattgatcggcaaaacgccgcttctgcagattttggattttcgaatccctaaaggcgttaacatatatgcaaaacttgaaatgatgaatccgggaggcagcattaaagaccggctcggagaagtgctgattgctgaagcgatcggttcgggaaagctgaaacccggtggaacggtcattgaggcaacagcaggcaatacgggaatcggtctggctctcgccgccagaaagcacggcattcgacccgttttttgcgtacccgagcatttcagcatggaaaaacagtcgattatgaaagcgctcggcgctcggatagttcatacccccagaagtgccgggatgaagggtgcgattgaaaaagcacttgaacttgagaaggagattcccgattcttattgcgttttgcagtttaaaaacctagtaaatccattggcttactataaaacgattgccccggaaatatggaatgatcttggcggccggattgacgtcttcgtcgccggagcggggtcaggcggcacatttgcgggaaccgccaagtttctgaaagaaaaaaatccgtccattaaaacggttattgttgaaccggaaggctcgattttaaacggaggggaaccgcatgggcataagaccgaaggaatcggaatggaattcatcccggaatacatggaggaaagctatttcgatgagatttacacagtgcttgacgaagatgcgtttcgactcgtaaaagaagccgcggaaaaggaagggcttctgattggaagctcatcaggcgccgcgttgtttgccgcattgaaagaagccgaaaaagcgaaagccggcacaaacattgtgacgatttttcccgacagcagcgaccgctatttaagcaaaaaaatttacgaaggaggaatatgatatgaagccaaaaacgaaaatgattcacggcggaattacaggagacgaaaaaacaggagcggtatcggttcctatctatcaggtcagcacgtacaaacagcctcgcgccggccagcatacaggatacgaatattcccggacgggaaatccgacgagaacggcgctcgaatccttgatcgcggatgttgaaggcggtgcagcaggctatgcgttcggctctgggatggcggcgatcacagccgtcatgatgctttttaaaagcggcgatcacatcgtattgacagatgatgtatacggcggcacctaccgcgtgatgacaaaggtattgaatcgcatcggcattgaagcgaccttcagtgatacgagcagcatcgaagacatcgaaaaagcgatcaagccgaatacaaaagcgatttatgttgagacgccgacaaatcctttattgaaaatcactgacatcaagaaaactgctgaaacagcgaaaaagcacgacttattgctgattgtcgacaacaccttctacacgccgtactttcaaaatccaatctcgttgggagccgatatcgtcctccacagcgcgacgaagtacttgggcggacacagcgatgtcgtcggcggacttgtcgtagcagcctcgaaggaactcgcagaagagatccatttcattcaaaactctacaggcgggattctcgggcctcaggattcctggctcttaatgagggggatgaaaacccttggcttgagaatggaagcccatgagcaaaatgcccggaaaatcgcggcgtttttagacgatcatcccgccgtcaaaaaggtttattacccagggctgccgtcccatccgggacatgagcttgccaagcggcaaagtacgggcttcggaggcatgatctcgtttgatatcggaaaagaagagaacgtggaccttgtccttggccgtttgaaatggtttacgatcgccgaaagccttggtgcggttgaaagtctgatatcggtgccggcgcgaatgactcatgcttcgatcccgcctgaacgcaggctggagcttggcatcacagacggattaatccgtatttccgccggggttgaggatattgacgatctgttggaagacttgcagcaagcgctggcccctctttcttaaaatggctgaatttacatgtctggtcatctgtcaatctatgttattctcaaatcatatccattatgaaacaaaagcaggtgatcatgacatgcagaagaaaaaagtcaaatcgctgatggaagactataagcagtttgcttttacgcttctcagcgtaagcgcatttttatatatcggatctgtcattccgggacaaggtttggaaacaggccaaaagatgacaatgatgctcgcgacgtgcggctttttaggaggagctttctattgtgtgaagcgctcgctcaaatataaaagacaattagacgaaatggaagaatcataagcagagagactcctgaaggggttctctgcttttttttgctcgatcaatccgtccatttttaaaaaaaacggtttacaaacaggaatttgatggatatacttacaaagtaaacaaaaagcaaaggaggttgatgaacatgaaaccagcactgactacatacattagactttgtgaatgccaataccatgattcatcaaacctgtgggagagattgtgcacttccttaaccgatgcttttacagcacagccgatacgttaggaagttaggcataataatacgctgctcctcccgcaagataaagactcgattcgtttttatctggcggtttttgtttgcgcccgcaggtttgtcagatgatctgcgggctgtttttgttttttagcgaacttgaaagggggtgagcgatgtgaccattaatctattcttcttaacactaaccattcagagacgatttaaaagtccggaagagtacgagcgagaatacgaaattgaacaaatgtacaatgaaatgaaagatctgcagctaaaatatctttacctgaacagccagcgctaacttaaagcgcgaaaaaaaataaaggaggagatcatgatgatttatagaagggaactgttggcacattacactcgggagaaggaccaggtttagccggggcaaaacgagttccgcatctccgcttttctgcataatatgaagcaagcaattcaaggaatgcaggtgaaaagcatgcagaaaaacggcagaatgccttttatcggccacgggtatacatcgatgccccattctttcaagcacggatacggtaatccgtaccggcgccaaagaatggagatggcgcgccacttcgggtattggccgcattattggtattattgagaaagagcagaaaacggtttgttttctgctctttttcatttgaacaaactaaatggcaaaatgaaaggggagctttaaagcccccctcctgttcatttagcagacgtaacaagcgccgatgataattaaaagaatgaatagaaccacaacaagcgcgaatccgcctccatagccgtatccgccgccgtatccgccagggtagccaccccagccgccgcagcatccgccgccgtaaccaaagcccataaatagcaccaccttttagtgaaaattccatatatactatgcatgggattaagttgtggaaagggcggatagaccaattcattaaaaaaacagttttcttaaagcgaaacttttcaaagctgaagccgtctagttatggaatgtaacaaaacaatgcagttatttttgcaaatgcttttaatattcggttcattggccgatatgagtggagaaaggcccgtttgtacgatttgcagcaaaaatcgggctaattagaattaaagcaggtgttttaacgtgtttgaacaatggcttggaaaacaattgcggagcccgagaggcattttgtcgaaatgggtcgcgtcatatatggaaaacgggaatcatgatataaacgaatggaccatcaacttgatggatatctgtccgcatgagcgcatccttgaaatcggaacgggaagcggagcggcactttatcggattgcggagatgcttgagggcggcaaggcctgcggcatagacgcatcaaaaagcatggtcaagcagggaatgcggcgaatccgtcatgtgaaagaagaaggaaaagccgaattaaagcttggccatgccgaacaaattccttatccggatcgttcttttcataaagtattttcagtccacaccatttatttttggacggatttcaaacaggcattaaaagaaatttaccgtgttttacaggttgacggcacgctgtttctcgctgtgcatctggaagggcaaatgaaaaaatcgaaaaaaacaaaaggcttttccttatactcagaagagcaaatcaagcaactgcttgaggaaagccatttcagagacatcacggtatatatgaacaaaaattactgctgcatttctgcggtaaaatcatgaactttgtatgatcatccctttcaatacggaagggattttttatgtttgatagagttgaaactggatcttaaatatcatatttttgatttttaaagaaaagtattccattaacatagcaaacatggtttaatatcaaagtgaacgtttttactatattttccggaggtatttatgaacaaaaggatcgtgaaaagttcaattgttttctttctccttgccgcattaatttttggccagctgcctttaccgaagacaatggcagccgaagacagcgttccgaataacgaaaccacattgaccagcgcgtcccctgttgaagcttcgtttcaaagcgatgacgaggtgcattggtataaagtcaatccttcaaatcaggaaatcgcaaactatacgcacttccgcgtcaaattgaaatcagatgcagagctgaacatttccgtctactccagcctggaaaatgcaactggtcatcaaacgtttgaccgatacaacggctactcctatgaaaataatcctgctttaatcgattttccgattgcctggaaaggtccttactacataaaagtagaaaatcaccatgatgaggaaaacgaaaccacttcaattacagatatttcttacaccatcagctatgaaggcgtcaccctgcctccgtcaatccaagaggcagaagaagagtgtccggcagaattaagcgtttccgaaagggaaacaggcaagggcatattaaaacagttaagaacgatcagggatgaagttctttcaaaaactgaaaaaggaaaagagctgtcttccctttactataaagcagctccattcatcagcgcaaaaatgctctttaacaaatcgatgagagacagtgtctacaaagacctggtgcagctgaagccgctgtttgcagatgtcgctaaaaacggacaagtgagcgcatactcgattacgaatgatgatcaaaaagcgatcagtcgcctgtacgaaacagctcgcgcgtccgttcccgagccgttgaaaaaacagctggatcaagtcgcgaaagacatcggcatcgaacaattaacaggcagcaaagtatcggctgtgcttgaaaaagcggggatggcgacagcttcatcaagcgcgcccgaaaaccgttacatcgtaaaattgaaagaaggcaaaaaaccgggatctttcaaatctaaagcccaatcatccggcgtccaggcattagagcccctcggtaaaagcaaaacggcatttaaagatgtgtacgttgtggaaatgaaggaaagccgttcttccggattcaaagcggcggcaaagcaatatcaggcggcagccgccaagatcgccaagatgcctgaagtggaattcgtcgaacaggttcagcaatatgaagcactgtcaagagacacccaatatccatatcaatggtcgctcaaaaataacggcaaaaaccgtgctgcgaatgctgacatacaatttgaacagcttcagaagctgatgaaaggcaaaaagctgaaagatacagtaatcgccgtcgttgacacaggcgttgatcatacccttgcggatttaagcggcagcgtcaaaaaagacgaaggctataactatgtcggccgcacggcggatgcgatggatgacaatggccacggcacacacgtgtcaggcatcattgcagccgcgcaagacaaccatttttcgatggcgggaatcaatgcttatgccaaaattctgcctgtcaaagtgctggattcttcaggcagtggagatacggaacagattgcaaacggcatcatctatgccgccgaccacggtgcaaaagtcatcaatttaagtcttggcgggccatacagccgggtgatggaatatgcgcttaaatatgcggcttccaaaaatgtgacgatcgttgccgccaccggcaatgacggagtatcggagatttcctaccctgcatcttcgaaatatacgctttcagtcggggcgaccaataatctcgatcttgtctcggactactccaattatggaaaaggtctcgatatggtggcgccgggaaccgatattccaagcctcgttccggacgggaatgtcacttatatgagcggaacatcgatggcggcgccgcacgtggcagctgcagcaggacttcttttgtcacagaatccgtccttgaaaccaaagcaaatcgcaagcctattgaccgagacgacagcagatgtggcatttgaagagcaggataatcccaacccggattatgacctggatatagaaccggctgcacaaattcccggatatgacttcgtctccgggtggggaaggctgaatgtttttcatgcagccagcgtttttgagctgaacatgaaggttcatcccgttttaaaccgccatacggcagtgacaggcacagccaaaagcggtgtgacggtcacaatcttgcgagggaagcaagtattggggacgggcacggccggaaaatcaggcgcgttttcagtgaaaattccggcccagaaggcggggcaagttcttcatgtcgcggcatcgggccatcaggcggaaacctcgctcagaaccgtcgtggaaaaagcgccgaaaaacccgtccgtcaaacgcatcacgaacaaagatactgccgtaacgggtagaacggcagccggctacacgatcaaagtgaaaaacgcgtccaaaaaagtgatcgcgcaaggcaaagcggatgcatccggagcgtttaaagtgaaaatcaacaagcaaaaagaatatgccgttttgtatgtctccgcatctgctgatgaccacagagaaagcggcgatgtcaaaatgacggtggctgacgtcatcccgccaggcgccccgaaagtttatcaggtttccgataaaagtacggtgattcagggaaaaacagaagcaaacgcgcaagtcagcgcaaaagctaaaggaaagacgatcgcttccggcaaagcgaacggaaaaggtgaatacaagctgaaaatcagcaggcaaaaagccggaaccgtcatcagcgtaacagcaaaggataaagccgcaaatgtcagcaaagcgacagatgtcactgtgcttgacaaaaccccgccgtctgcgccgaaggtgaatccggtgacaaacaagagcacggccgttaaggggaaagcagaagcgaacgccgccatcatcgtcaaatcaggaaagaaaacgatcggaaccggcaaggccgataaaaaaggcgcgttttttgtcaaaataaaaaaacaaaaggcaaacaccgttttagcggtcactgcaaaagataaagccggcaatacgagcaaagtgagcaaaataaaagtcaaaaaggcaaaataatccgatggcggaggaactgatgacatatcagttcctctttttttcatcaaaattaatatattagaatattattaaatctgcactgtctattttcaatttgtgattttcagctcatatcgccaattggtcctattatcccttttttcatttttccttaaaaatttttatattaaaaaaggaatcttcgggtgttctgtcaaaaagtgaatgtattggaaacagcggaatgaacgttcattccgctgacttggagggcaaaatcaatggaatcggaaagcaaatatcagaagattatcgaggcttcgctcgtccttttcgcggacagaggctttgacgccgcaaccattccgatgatcgccgataaggcaaacgtcggtgcaggcaccatctaccgctactttgacagcaaggaagcacttgtaaacgtcttgttccaagacagtgtgaagagatttaaagaaaagatagaggagggctatcctgaagattcagcaggcataaaaaaacaatttcagcacattttccgctgccttttcgagttttctcaggaaaatatccatgcgctgtattttttggaaattgacaagacctctcattacttgactgagaaaagccgcgaggtcttgaacgaactgctggatttcatctatttattttttgaaaaagggaaagcggccggcatgattcgccctttgccttcccacattttgtcggctgttgtattcggagcgttcgttcatattcagaagttggtaagagcaggggaattcgaggaccctaccgaactgatggaggagattgaagaatgttcctgggatgctgttaaacatcatggatgaaaagcttttttccaaaacagaaaggatgattttcatgaacaagttagatggaattccaatccctaaaacttacgggccgctcggcaacctgcctttgcttgacaaaaacagggtctcccagtcactttggaaaatcgcggatgagatggggcctatctttcaatttaagtttgcggatgcgattggggtttttgtgtccagccatgaactggttaaagaagtctctgaagaatcccgttttgacaaaaacatggggaaggggctattgaaagttcgcgagttcagcggagacgggctctttacaagctggacggaagaacccaattggcggaaagcccacaacatccttctgccgagcttcagccagaaagcgatgaagggataccatcccatgatgcaggatatcgccgtccagctcattcaaaagtggtcccgtctcaatcaggatgaaagcattgatgtgccggacgatatgacgcggctgacgctggacacgatcggcttatgcgggtttaactaccgctttaacagcttctaccgtgaagggcagcatccgtttattgagagcatggtccggggtttgagcgaagcgatgagacagacgaagcgcttcccgctgcaggataagctgatgattcaaacgaagcgccggtttaacagcgatgtcgagtcgatgttttctcttgttgaccggatcatcgctgaccggaagcaggccgagagtgaaagcggaaatgacctcttgtcgcttatgcttcatgcgaaagaccctgagaccggcgaaaaactggatgatgagaatatccgctatcaaattattacatttttgattgccggacacgagacgacgagcggtttattatcgtttgcaatctatctgctcctgaagcatccggataagcttaagaaagcgtatgaagaagcagaccgcgtgctgaccgatcccgtcccatcctacaaacaggttcagcagctgaaatacatccgaatgattttgaatgaatcgataaggctttggccgacggcaccggctttctctctttatgcaaaagaagaaacggttatcgggggaaaatatttgattccaaaaggacagagcgttacagtgctcatcccaaaactgcacagggatcaaagcgtctggggagaagatgccgaggcattccggcctgaacggttcgagcagatggacagcattccggcgcacgcatacaaaccgtttggcaacggccaaagggcatgcatcggcatgcagttcgcccttcatgaagcgacgcttgtgctcggcatgattcttcagtactttgatcttgaagatcatgcaaactaccaattgaagatcaaagaatcgctgacattaaaaccggatggtttcacaatccgggtgaggccgaggaaaaaagaagcaatgacggcgatgccgggcgctcagcctgaagagaacggacggcaggaagaacggccttccgcaccggcggcggaaaatacgcacggaacccctcttcttgtgctctacggttcaaatctcggcacagccgaagagattgcgaaggagcttgctgaagaagcgcgtgagcaagggtttcacagccggacggcggagcttgatcaatacgcaggcgccatcccggcagaaggggctgttatcattgtgacggcttcctataacggaaacccgcccgattgcgcaaaggaatttgtcaattggcttgagcatgatcagacagacgatttgcgtggtgtcaaatatgcggtattcggctgcggtaaccgcagctgggccagcacctaccagcggattccgcgcctgattgacagcgtattggaaaaaaaaggcgcccaaaggctgcacaagcttggagaaggggatgcaggcgatgattttgaaggacagtttgagtcatggaaatatgatctgtggccgcttttaagaaccgaattttcattggccgaacccgagccgaatcaaacagaaacagacaggcaagccttatctgtcgagttcgtaaacgcacctgcggcttcgccgctggctaaagcttatcaggtgttcacagcgaagatatcggcaaaccgagaattgcagtgtgaaaagagcgggagaagcacaaggcatattgaaatatcgcttcctgaaggcgccgcatatcaggagggagaccatctcggtgtgctaccgcaaaacagcgaagtgctgattggccgcgtttttcagcggtttgggctgaacggaaatgaacaaattctgattagcggccggaatcaagcatcacatttgcctttggagaggcccgttcatgtcaaagacctttttcaacattgcgtcgagctccaggaaccggccacaagggcccagatacgcgagctggcggctcatactgtttgtccgcctcatcagcgcgagcttgaagacctgctgaaagatgacgtctataaggatcaagtgttgaataagcggctgacaatgcttgacctgcttgagcaatacccggcctgtgaactgccgttcgcccgttttctggcgcttcttcctccgctaaaaccgaggtactattcgatttccagttcgccgcagcttaacccgcggcaaacaagcatcaccgtctctgtcgtaagcggcccggcgttgagcggccgcgggcattataagggagttgcatcgaactatctcgccggccttgagccgggagacgcgatttcgtgtttcatcagagagcctcagtcaggcttccggcttcccgaagatcctgaaacaccggtgatcatggtcgggccgggcaccggaatcgccccttaccgcggatttcttcaggcgcgccgcatccagcgcgatgccggtgtgaagctcggtgaagcgcatttgtacttcggctgccgccgtccgaacgaagattttctgtatcgagacgagttggagcaagcggaaaaggacggaatcgtccatctgcatacagcgttttcccggcttgagggccggccgaaaacatatgtgcaagatttgctcagagaggatgcagccttgctgattcacttgttgaacgaaggcggccgcctgtatgtgtgcggagacggaagccgcatggctccagctgttgaacaagctttgtgcgaggcgtatcgaatagtacagggtgcgagtcgggaagagtcgcaaagctggctgtccgcacttttagaagaagggcgctatgcaaaggatgtatgggacggcggcgtttcccaacataatgtgaaggcggactgcattgcaagaacgtaaacaaaaagaggcattctgaattgatcaggatgcctcttttttagagtttgttattttttcattgatatagatgaaaaggtttgatcccaagaacaaaacgagcaaaatatacacccattttgccggcgtttcccaaccctcgaaaaaaggcagagaagcaatgaatgtttgtcctttcatgatgacaaacaccaataacgccacaaagatgatgagagtgattccctgtaagatgagcgtttttgcacttcgttttttcaagtcgtcccatacgtacaccagcacgaatacgagggaggccgttgagatgatatcattcgctgtgccgtttatcttgagcccaaacctgagaaaaagatttaaacatacagatgccaaaaatccataaaatccgattgttttaagcaaggtgattccccccctcaaaccattatagagggagataaaggaaaagccaacatgacaggctgtgttcaatcattctaaaaacggctgatcttcaggaggaatcgccatgctggctttgatttaaatatcggcatgcggtgaagaaagtttagcttttatttcggacctgtgaattgtcttgccgtttgtttcttttggcttcggcaaagaaaatgaccggataagcgatcaaaagcagcccgataatgaatgagatgattcccggccatttaaaatgggtccagaagaagcctccgaaagaccccgctaagcttgagccgagataatagctcagcaaataaagggaggaagcttgaacgcgctgttcgccggccgtctgcccgacccaggagcttgcgatcgaatgcgacccgaaaaatccaaatgtaaaaacagcgattccggcaattttaagaggaagctgaggcagaagcgtaagcaatgcgcctcctgcgataatggcaatcccgattttcagcatcaacgggctgccaaaacgatcggctttcttccccatatagacagaactgagcgtccccgccaaataaacgataaagatgaacccgatgacagtttgagagagtctgtacggaggtcccatcaactgaaacccgatataattgaacagcgtaacaaagcttcccattaatagaaatccaagtgaaatgattgacagcagccgtttgttcatcaagacggcgccgtaggccaagctcgcttttttcacacttgtttttcgcttagcggagtgctgcggccggggcagcaaaatccaaaacaaatagcttaatagtactgataatgccccgatgattcctagcgccgcgcgccagctgaacaagtctgtcaaaaggccggtcaaaagccttccgctcattcctccgaggcttgtgccgctaatgtatagccccatcattttgccgagccctcgcggatcaaattcctctccgacataagccatggcgatcgcgggcacgcctgcaaggaaaaagccaagcagccctctcatcgccaagagcgccgcgaagttcggactaaaggcggtcaagaggccgagcactgatgtcgcaaacagggatattgccataatcgttttccggccgaacccgtcagataaagctgctgccgtgagcaatgcaaaagccaatatgcctgttgaaatggataaagttaagcttgcagctgccgccgatatgccgaattcctccgcaaacagaggcatgagcggctgtgtggtgtaaagtgtggcaaatgtcacaaaaccgctgatgaataaggcgatgctcgctttgtgataatccttcgaatgcggctgtatgtaggtcatggcagctcctcttttctagaatgacaatctatgtttcatggtacgctttcatttgtgatgtgtctaatttataataactatcatcatcatgcgttttatttatgaaggagcggatgaggattggaactctatcaaattgacccttttattgccgtgagcaggcataaacactttacaaaagcagccttggaacaacggatttcccagccggctttgagcaggtcgatcaaaaagcttgaagaagaattgggcgtcccgctgtttattcgaaaaacaaaatcgatccgcctgacaaagtacggcgagcagttcctcatcaaagcgaagcaggcccgccttgcccttgacgaaggcgttcagcaaatcagggaaagcgtcaatccgaatgccggggaaatctcggtatcatttttgcatacgcttggttcgcggctcatgccgcagctgattgccgaatttaaaaagaaatacccgaatgttgctttccgtctgtatcaggccgcaaatgaacatcttcagcacatggtggagacgggcgaagctgatatctgcctcagctctccgccgcttccaaacgagcatcttgaatggacggtgttggatactgagcagctttatctggtgcttccagccgaccacccgcttgcagatcggaaagaagtcgcgatccggtcgattgcacacgaagactttgtctgttttaagccgggctatggtcttcgatatgtgtttgatcaaatgtgccggggactgtccatcagcccgaagcttgcttttgaaggggaagaagtgtcgacgattttgggactagtatcagcagggctcggtgtagcaatcctgccgaaaacggcggagcacgtccattctccagtggcattttgccgagtgtcagactaccgttctgagaggacgatcggtctcgccgtcctgaaagaccattatttgtcgccggcggcacgcaactttaaagaatttgtcattgaatactatcgccggaacgaacggtctgatcagccgtaactcaaataaggacttctcaagatgacaaatatcctgtatattgataatgataattattatcaattggaggattaaatatgacgaaaaagcaatattcttatatattcacccttttactcgctttcgctgtatttctttcaggctgtcaaagcggccagaaacaggctgcatcagagaaaaatgaagagaaaacaagagtggtgaaaaccatcaacggaaatgtcactgtaccggctaatccgaagcgcgtcgtgacgattggctatgcgggaaccatgcttgcattcgggatcaagccgcttggagaaacgggaaagtaccttggaagtccttatattaaagatcaagtttcaggaataaaggatatcgggggaaaagacggtttttcagtatctgtggaaaaagttcttgagcttaaacccgatttaatcgtatcgatgacgaacgattcaaaagaatatgaaaagctgtcaaaaatcgctcccactgtcgtctatccgttcggcacatttaaagatgcacgcgatgaaatgaaaacgtttggcaagctgctcggcaaggaaaaggaagctcgggagtggacaaaaacgtttaatcaaaaaatgaaagccgcccgcgcgaaaattaaagatgcatctgtaaaaggtgaaacgttctctttaatcggcgcatatgcaaaatctttatatgtctacggggcatacgggtatcggggcggagaagcgatctatacgcagctgggactgacgccgcctgaatctgttaaaaaggatgcaattgatacagctgacggatataaagccatatctttcgaggtcctgccgaaatatgccggagactacatatttgtcgacgaatcatacaacggaaagcttgatcaggacaatccggtttgggcatcgcttgacgcggtgaaaaaaggcaaggtctttttcctcgatccggacagattttggccgtatgatccaaacgctgttcaggcacaggccgaagaaatcgccgacatgatttccaagaaagcgaaaaataaatagaaaagcggggagccgaaaagaatgatccggcttcccgctttttcatttttcataatgctgaaattgaatatccagtgtccggaggtacgtttgcaggcccgcatcttggatggggatgatataggcggcttcatctgactcattatggtgggaatgccataatcccggcggtgtaatgaaggcttttccggttacccagtcaattcgtttcggatcaatgatttcctttgtggccggatcgattttgcttccgactaatgtatacgtgccgggtgcggcataggcgacaaaatcgagagccaccgacttgtggctgtgaggagcttgattggagccgggaggcacgatgccgaacattgcccacaatacatgggtgatcgtcagcgtttgatcgaatatttcattgttcaagagaacggaaatgcggttgcgataacgggcgtcaggagcggcggccgcttcagccaattttgcttttgactgttcagcggtgtagagagttggttgaaagcgggattccgacggctttacgcccaaataattcaggagaggtgaatcggtgatgtaataaatggctgcatcttctgctgcggtatgccggctgcctgaaccggcaggcaaagtcaaaaaatcgcctttctgccagtgaatcgtatcttcgcccgtttcggttttccctgcgccgctgacaatgtaatatagttcgcttgtcgcacggggggcagtgtgtatcgtgtcgcctgaacgaatcttgatgaagtgggcgagaagggaagggcttgaagcgggataatccgtcttcagttcttcggaaatgtccagcgggatgatccgcgtttcacctgtctcatacaattcaggcccgaactctttcacaggaaccgggctgattattccgcttccaatcgggtcagaggcagtggtatactcgaaaaaacgggcatgtttcgtcaaatgctcggctcgggtttcaaattgagaatgcattgaaaaaacctcctgttatttttagataattcaatcatatctcatttggaagatgctagtaaacagttgcattgacaaaaaacagattacggaaaagagggattgcattgggaaaaggattgaacggcagaagaattgccatcggagcatcgcgaaaaacggatgaaatgagcacgctgatcaaaaagcaaggcggggttcccctcattcgctcccttcagggtaccgtgtttttggccgaaaaagaagtaggccctgatttgcgtgccttcgttgaaacgggagccgactgggtgattttcacgaccggaatcgggacggaaacgcttgtcagcctagctgagaaacttgggatcggagagcgctatttacaagcgatccgcagggcgaaagcggcatcgagaggctacaaaacaatcgccgctttaaaaaagctcggcattacgcccgttgcggcggatgaagacggcacgaccaagggactgatcgactcgctccaatcccacgatttttccggcaaacgggtgatggttcagctccacggcgaaaacgctccgtcactgcttcagtttttggaagagaaaggtgcagacgctgttccgcttctgccgtatcggcatgttgctccagaccgggaaaccgtcgctttattatgcagcgagatcatcaaccgtgaagtggatgcggtttgctttacaacggctgtccaagtccgctcgctttttcatttcgcgaaagaaaacggctatgcggagaaaattgttcaatcttttcaagacagcgtgttggcggccgctgtcggaaaagtgacggcagaagctttaagagaagaaggagtcgaacgccttctcgctccggatctcgaacggatgggagcgatgattgtggagctggcgcggttttatgaaacggaagaggggataagaacacagtaagtgcgaaagaaatcagcagattggggtgtgggagtctccttgggggcgttgtgatgttttttaaagatgcagacccaaaaggaaaaaagccgaagatgcagcttgccgtgcggcttttattttctgggccgtgatactttttggaaatagtacttttgaatattttgatcatgagccgttgattgcgaatttttcttttttgctaggcttaggcttagccgtgttttttctgacggaacgcctggtcaaacggcttgcatccacaaaaacaagaaaaacgcttcgctgatgagccgaagcgttttttgctttataaaacaaattgatctgagacgaatactgcgccgtcttctttaaacatacgggcgggctttgttccgatgacccggatgtctgaagtgcttgctgcgattcctgtttcctctggcaaggcgatgacgggagtgccaaaagcattcctaaaccttttaatcagcggatcatgttcagccttgtagtggcaccaaaccgaatagtctccgaggagctttaagccgttaaaatcccgcaatccgcaagcgttgcgatccatataagagcaagtcataatgttctttccgagaatgacggcgccggcgcttccgccgtaaatggcgccgccgctttcggcatagcgctttaaaaccgcggtaaaatgcgattcgatgaattgttttagcagacgaaacgtgtttcctccgccgatatatacggcagaaaacacgtctaaatcgtgtacggttttacctttgacatccgtccacatgacaatgtttttgatgccgagcgggtgaaagagccggctgatccagtcgaagccgtcatcatacctgtcggcgtccatggcaatcggaatatacaataatggcttatgaggacagatgctccgggcaaaatgccgatccagctgttcggtttggtgtgcatctccgcctccggaaagaaaccattttcccatcctgacctccacttatttatcatgtttcctttaattgttcattcagcacgctgtcctccaaaacagcaaatttgtctccatacacttttgtaatgtgtttttcgccccaggagcacagcgaatccaaaatgtctttaagcgtccatccgtattcgctgagttcgtattcgaccttcggcggcacctgctggtacacgatccggttgatgacgccgtcctcctccagttcgcgcagctgctgggtcagcattttctgcgtaatgttcggcatcagccgcttgagctcgctcgtgcgttttttgccgtgcgtcaagtgacacaaaatcacgcatttccatttcccgccgatcacttcaagtgtagcttcgacagatatattatactttttcggcttcatgttctcctccaatccataggtaccgaaaagtacctatctcactttttggttcctatcacacttaaaagtgcgtacttttttttgcagatgatatgtaccataatatcattagccggcagccatttgctataccttaaaaaagaaaggagaaaaagaatgacctctgttcatgataaaaaacgcagtatattagcgcttttagccttggcggccagcgcatttgccatcggcacgaccgaattcatcagcgtggggcttctgcctttaattgctgaagacatgaatatttcggtgacgacggcaggactgaccgtatcattatacgcactgggcgtaacagtcggcgcacctgttctgacgtctgtcacatccagtatgccgagaaaagcgctgctgctggtgattatgctcatttttatgatcggcaacgggcttgcggcatgtgccggaagcatcggtgttttattaaccgcccgcgtgatttcggcgttttctcatggcgtatttatgtcaatcggttcaacgattgcggcaagcctagtcccggcggataaaagagccggagcgatatcgatcatgtttaccgggctgacgattgcaatgattaccggagttcccatcggcacgttcctcggtcagcagttcggctggcggattgcttttgcggcgatcgtcgctgtcggcgcactggcgtttatcgccaacagcttacttgttccgggcgatttgccgaaaggcgtccgaacgtctttcaagagccagttgaagcttgtgaccaatgggcggctgctgcttttattcatcattacggcgcttggttatggagggacatttgttgtctttacgtatttatccccgctgcttcagcatgtgacgggctttaaacaggaagctgttgccgtcattttgcttgcttacggcattgccgtcgcgctcggaaatattatcggaggtaaagcggccaacaaaaaaccgcttactgcattattctatatgttcatcgcccaggcggctgtgcttctcatcttaacggcggctgctccttatcaggcagcgggctttatcgtcatcatgctgatgggatttttagccttcatgaatgtccccgggctccagtcctatgtggtgattctggctgaacggtttgttccaggggcggttgatgtcgcatcagctgtcaatattgcggcgttcaacgccggtatagcgatcggttcttatacaggaggcgccatcacacaatcgatcggattgattcacactccatgggtgggagctttgatggtgctcggcgccgtcgtgctgacaggctggagcagggcgctggaacgaaatgatcaaaaacaaaatgatcaaaaacaaaatcaagctttaaaggaaaactgcgcatgacgcatacaaaatataaggaggccaattaaatgatgacagcaaaaaatttgcaagatcgaatcaaattgaataacgggacagctatgccttggtttggacttggcgtatttaaagtagaagaagggcccgaactggtacaagccgtaaaaacggcgattaaacacggctaccgcagtattgataccgcagccatctacggtaatgaagagggggttgggcaaggaatccgcgaggggttgaaagaagccggcatttcaagagaagacctgtttgttacatcaaaggtctggaatgacgatttaggctatgacgaaacgattgcagcctatgaggcgagtctcgaaaagctcggacttgactaccttgatttatacctgatccactggcctgttgaaggacgctacaaagcggcgtggaaagcgcttgaaacactttatgaacaaggacgcgtaaaagcaatcggagtgagcaattttcagattcaccatctggaagacttgctgaaagatgccgccgtcaaaccggcgatcaaccaggttgagtatcatccgcggctgacgcagaaagagctgcaagcgttttgccgtgcgcacggcatccagctgcaagcatggtcgccgctgatgcaaggccaattgctcagccatccactgctgaaagatatcgcggacaagtacggcaagacaccggcccaagtcattttgcgctgggatttgcaaaacggggtcgttacgattccgaagtcgactaaagcggagcggattgcccaaaacgcggacatatttgattttgaactgaccaccgaggaaatgaagcaaattgacgcgctgaatgaaaacacccgtgtcggccctgatcccgataactttgacttttaacaaaacggccccgttcgacattcgaacggggctttaattgaattgtgcggttacaccgccggactccatcatcatcagttcttttttcatatccaatccgccccggtatcccgtgagctgcccgcttttaccgataacccgatggcaaggcaccaccattaacagcggatttgcgccgatcgccgcgcctactgcccgcacagcggcctgcttttcaatatgctcggcgatatcgaaataggagcaagtgctgccgtaagggatttcggagagcgccttccacactgccagctgaaaaggcgtgccggcaaggtcgacaggaaagctgaaatgagtctgcttgccgttcaaatacgcctgcagctgctcggcgtattctgccaatcctttgtcatcccgaatgaaaactggctgtgtaaatcttttttcagcccaagcggccaaatcctcgaagccttgattccatccccctgtaaaacagagcccgcgggcagtcgccccaatgtgaatctgccaacctcggcaaataagcgtacgccagtatacgatttgatcgtccatatgtttacctccgtttcatttgccggtacgacgtcggcgattgcccagtcttctttttaaacaaagaggcaaaatattccgcattcgcaatgcctaccattgaagcgatttctgcgatcgatcgttctgaatgagcaagcaaatcgaccgctttctcaatccttttctgcaggatgtattctgccggcgagacgcctttgattcgtttaaatgtccgctgcaggtgaaaagggctgatatggcacctgtcagccaaagcttgcagagacagcgtatcgcgataagatttctcgatgatttgcactacccgctgtgccagctcttcatccggcagcagcgccccggcgggattgcagcgtttgcaggggcggaacccttctgataaagcatcttttgcattgaaaaaaatctgcacattgtcgatttgcggaactctcgatttgcaggatgggcggcaaaatatgccggtcgttttgaccgcgtaataaaaaactccgtcataggcggaatcgttttccgtaattgcccgccacatttcaggcgtcaatcgtgatttgctgttcatatcttcaccccgatatatgtcagtataacctaaatgacagccgggggtgagagacggagaacggcacagcaagaatacaaagaaggagggatcggttgcttcggcctccgaaacgcgctacaattcatttacaatacaggatgaggtgagaatattgccgaaatcagtgaagcagtcctcctaaaataaaaatctatattttaggaggtaaaacatgaattttcaaacaatcgagcttgacacttggtatagaaaatcctattttgaccattacatgaaggatgcgaaatgttctttcagcatcacggcaaacgtcaatgtgacaaatttgctcgccttgctcaagaaaaagaagatcaagctgtacccggcttttatttatatcgtatcaagggtcattcattcgcgccctgagtttagaacaacttttgatgacaaaggacggctgggttattgggaacaaatgcatccgtgctatgcgatttttcatcaggacgaccaaacgttttccgccctctggacggaatactcagacgatttttcgcagttttatcatcaatatcttctggacgctgagcgctttggagacaaaaggggcctttgggctaagccggacatcccgcccaatacgttctcagtttcatctattccatgggtgagctttacaaacttcaatttaaaccttgataacagcgaacacttgctgccgattatcacaaacgggaaatacttttcagaaggccgggaaacatttttgcccgtttccctgcaagtacaccatgccgtgtgtgacggctatcatgccggcgccttcatgaacgagttggcacggcttgccgccgattgtaaggagtggcttgtgtgacagaggaaaggccgatatgattcggccttttttatatgcgctgcttagcggtcttactgtggtgtgtttactcccggcatttggaacgccggctctcaacaaactttctgtagtgaaaatcatgaaccaaacggatcgtcggcctgattaacagctgaaagctgccgatcacaaacatccatagtcccgccggcttcagttcctcggagaaaaagcagaagctcccgacaaggaataaaaggccgatgagaaaatcgtttaatgtatgtagaactttgtatctttttttgaaaaagagttcatatcgattgttattgttttgcggcattgcttgatcactccaatccttttatttaccctgccggaagccggagtgaaacgccggtatacataggatttatgaattaggaaaacatatggggaaataaaccatccaggagtgaaaaatatgcggttattcatatgtgcatcgtgcctgttcggcttgattgttccgtcatttgaaacgaaagcgctgacgtttgaagaattgccggttaaacaagcttcaaaacaatgggaagttcaaatcggtaaagccgaagccggaaacggaatggcgaaaccggaaaaaggagcgtttcatacttatgctgtcgaaatcaaaaacattggacacgatgtggcttcggcggaaatttttgtctatcggaacgagcctaattcttcaacgaaattttcgctttggaacattcctcacgaaaatccggtttctttagccaaaagcttaaatcacggaagctctgtcaagcaccgcaatctgcttatggcagagaatgcgaccgaattggaagtggacatgatttggacggaaaaaggaagcgaaggcagacttttaaaggaaacgttcattttcaagggagatgaatcatgaagaaaaaatggccgttcatcgtcaacggtctttttttaatgacttaggcagccgatcgttcggccatacgatatcgaagcgacctcgaaccagcagagctcgtcacaaaacatttgcatttaaagaaaaatacaggatgttttcaccaatatttttctcaatgatgatacactattgacaagctgctactttgggagggtgtttccatagatgccgatgaagcaaaaacaccaaatgtgtcatgagagctctctctaatcgatataaaagtagggtgaaccggggttgtcaatctgtaaaagatctttttttatcccgtgatacgcttttggaattctgaatcttcaagaaagtccccagccttttgctgatcaatcgagaacaaaggatgatacatatgaaaagaatagataaaatctaccatcagctgctggataattttcgcgaaacgaatatcaatcagcttttaaagatacaagggaattcggctaaagaaatcgccgggcagctgcaaatggagcgttccaatgtcagctttgaattaaacaatctcgttcgggccaaaaaggtgatcaagattaaaacgttccccgtccgctacatcccggtggaaattgttgaaaacgtcttgaacatcaaatggaattcagagttgatggaggttgaagaactgaggcggctggctgacggccaaaaaaagccggcgcgcaatatatccgccgatcccctcgagctcatgatcggggctaaagggagcttgaaaaaggcaatttctcaggcgaaagcggcagtcttttatcctccgcacggcttgcatatgctgctgctcgggccgacgggttcggggaaatcgctgtttgcgaatcggatctaccagttcgccgtttattctgacatattgaagcccgattccccgttcatcacattcaactgtgcagattactataacaaccctcaattattgctctctcaattgttcggacataaaaaagggtcttttacaggtgcgggtgaagacaaagcaggattagtcgagcaggcggacgggggcattttgtttatggatgaaatccatcgcctcccgccggaggggcaggaaatgctgttttatttcatagacagcggcacatacaacaggcttggtgaaacagagcataaacgaacggcaaaagtcctgtttatctgtgcgacaacagaaaatccgagctctgcattgctgaagacatttttgcggagaattccgatgaccgtacatatcccttcgctcaatgaacggtcccttggagaaagagtggagctgacaacgtttttattggggaaagaggcagagcggatcaaaaaaaacttaaatgtgcacatcgatgtgtataatgcactgattcattctgcaaaattcggaaatgtcgggcagctgaaatcaaatgtacagctggtctgtgcgcacgggtttttaaataaccttgacaaagacgaggttgttgaactgaccgtccgggatcttccggacgagatcaaagaggactggatgtccagcagcaaaaatattgaacggagcaaaatgatttctgaatatgtcaacattacaacgatcatctctccgattgtggaagatgaagcaacgaaaatcgatgactcctttaacttgtatcatgtcatagaaggaaaagcgaaaatcctcaataaagaaggcttaacaaaaaagcaaatcaatcaatatatattaacggatattcatttgcacgtcagaagcttttttaatcagaaaatgcttcaaaaccacagtttactcaaattcgttgaagacgacgtgattcagatgacgaaagaattaaagggagtcgccgaacatgagcttgactgcaagttcgaccgtaaattcatctatttcctgagcatgcacatcgccgcatttttaaagcgcggaaagcagattgatgtcttaaattcgcaggaaacagatgaaatcagggaaacccatgtgaaagaatacgaggtcgcactcattttcaaagataaaattcaagcatatttcaaagtaaccgttccggaaatcgaagtcatctacttgacgatgctcattcagtcgattaaatcatggaaagaaaacaaaaggacgggcattgtcgtggccgcccatggaaacagcacggcaagctctatggttgaagtagccactgaactgctgggaagcaccccgatcgctgcggttgatatgcctttgaccgtttcaccctcggaaatcgtcagctgcctggcggagaaagtgaagcaggttgatgaaggagaaggcgttttaatgcttgtcgacatgggatcgcttgcgatgctggaaagcaggcttgaacaacaaacgggcgttaaaataaaaacgatcagcaatgttacgacatcgatggtgctcgatgccgtccgcaaggtgaattatttgaatttgcacgccatctacgattcggttacaaaggatttcatcgatttatgggccgataaaccgcgggtctcaggcaaaaagaaggcgatcgtctccatttgcacaacaggcggcggaacggcgaagaagctcgaagagattttaacatcaatcgtgagcaggacatctgatgaacaaatcagcattttgacggtgccatcgatcaaattagcaagccgcatcaaagaaattgaaaaagcgtatgagattcttgccacggttggcacgaagaaccctaaaatcgatgctccgcacgtccctttagaagtattgattgaaggcgaaggggaaaaagtgattcagcaggtgattgcaaccggcgatatcccgatgagcggcggattatccggtgaaaatgtggtggtgaaggagctttgcgaagacagcctgaagaagtatcttgtctttttgaatccctatcatgtgatagacatgctgttggagtggcttcagacggttcaagacgaactgcgtatgacattcagcaacgctgtgctgatcaaagtcatcatgcataccgcttttgcttttgaaagggtgatcaaacagaacccgatcgcttttccggaggaggaagagatgaatgatcagcttgaaaacgttcttcacatcacagagaaaacattaaagccttacgaagaaaagcttggtcttgcgatcagcgaagatgaaaaaatgtttatcgcgtccatctttgctgaagagttatagctgtttcccatcggcaattttttcatgtaaacctgtattaagtggacccccattttaatacaggtttatttttatgcttaaacgtgtttcaaatatgaaaataattcgtcttgaaatacaatgaaaacgcttaatacagttttgttggcacgatacttgcattataaataagcgaacgaaaaaagaaaggagcaaatgtacatgattacagtcattatcagcggccacggaaactttcccatagcattaaaagaatcttcagggatgatattcggagaagaagacagtctgatcgcggtgccgtttctgaaaggggaaggcattcagacactgcaagaaaaatatcatcagacgctgaaggatgttccggaggaacacgaggtgctttttttagtggatattttcggtgggacgccatataacgcagcgaccccttacatcgcgaaagagcggagattcgatatggcagccggagtgaacctgccgattttgttagaggcattgagcttgagggagcatatgccgctcaaacaactgctgaaccagttgaaaaagatgagccgggaatgcttccaaatatgcagcgagcaattggaaaaattcagtcagtccaatcagggaagagaggatgaattgtaatgaaaatcgttttggcaagaattgatgaccgctttattcacggccaagtattaacaagatggatcaaaatccacgctgctgatcgcattatcgttgtctccgatgaggtggcacaggacgaaatgagaaaaacgctgatcctttctgttgcaccttcaaatgtaaaagccagcgccgtttcgatttccaaaatggccaaagcgttccacagtccgcggtacgaagatacgacggcaatgctgttattcgaaaatccgggcgacattgtttccttaatcgaagcaggcgttccgatcgaaacagtcaatgtcggcgggatgcgtttcgagaataaccgcaggcaaatcacgaaatcggtaagcgttactgaaaaggacatcaaatcgttcgaacaattgcatgaattgggcgtgaagctggaactgaggcagctgccgtcagattcgagcgaagactttatgcagatgttaagaaacgcaacaaaatcctagaaggaggttctaaaggcatgtcaacgattcaaatcattttgctgcttgtcatcgctgctataacaggtatcggtagtgtattggacgaagggcagacacatcgcccgctgattgcctgcactttggtcggccttgtcctcggggatctgaaaacaggcatcattctcggcggaacgctggagctgatggcgcttggctggatgaatgtcggtcttgcaatggcccccgatacggccatcgcttccgtgatttcgactatcttagtgattaccgccgatcagggaatcggcgaagggatcgccgtcgcggtggctttggcagctgcgggtcaggcgctgacgattttcgtccggacgatcaccgtatttttaattcaccgcgccgacaaatacgcaaaggatggcaattttaaaggaattgaaattatgcatataactgccatggcgtttcaggcgctgcgcgttatgattccgacattgatcgtggctctgatcagtgtcagcgctgttcaggcgtttttgggaaatattccggaagtcatcacaaaaggcttgcaaataggcggaggcattatcgttgttgtcgggtatgcgatggtcatcaacatgatgaacattccgtatttgaagccgtttttctatatcggttttttgctggccgcgttcaccgatttcaatttagtcggcttcggcgccctcgggctctgtctggcatttttatatcagcaagtgatgcaaaaaaatcatgctcaaggggcggttgctgccgccagtgacggcagcatggccgcttatgatgatgacgatgatctggatgcttaaaaattaaaggagggacgaataatgggcacagaaaaaagattaacgaagagagagattttcagtatgtttatccgctcaaactttttgctcggatcttttaactttgagcgtgtacaggcgctcggctactgctacgtcatgattccggcgatcaaaaaactgtacggtccgggagcaaaacggagcgaagcgctccagcgccatttggaatggtttaatacacatccgtggctgaccgcgccgatatttggcgtaaccgctgcgatggaagaagaaatggccaacaataaaaagattgatgccaaagcaattaatggaatgaaaatcggcttaatgggcccgttggcaggcgtgggcgacccgattttctgggggacgttgcgcccggttttggcggccttgggagcgtcgcttgctttaagcggaaacatcgccggcccgcttttgtttttctttttaatcaacgccgtcagattaagcactaaatactacggattaaagtacggctatgtgaaaggcatggaaatattgcaggacttggtggggaaccgcattcaaaaactgacggaaggcgcttcaatactcgggctgtttgtgatgggagctctcgtttccaagtggaccacaatcaatatcccgatcgtcgtgtcgagaattaaggataatgcaggcaaagtcgatgtaaagaccgtgcaaaacattttagacagcatcatgcctggtgtgctgcctttaggattgacattgctcgctgcctggatgcttcgcaaaggggtgaatcctctgctcatgattttcggtatttttatcatcgggattgtcggctattgggcaggttttttggcataacatgttttgggtgttcttttcttagcttttgagaagcaggtccattcggccgcaaaaaagggggcggctgtttggacttcctgcctaaaaaaccgagtgaagaagaggggggaaaaagtcatgaaaaagagaatgattcagatggagatcataggggctatgatgttcccggaagccttttccgcagctgctgccgacccggactactataacgaggatcatcggcccaagtatcatttcacgccggaagcaaactggatgaatgacccgaacgggatggtgtattacgcgggggaatatcatctgttttatcaatatcatccatatggcttgcgctgggggccaatgcattgggggcacgcggtaagcaaagatttagtcaagtgggagcatttgccggtcgcactgtatccggatgaaaaaggaacgattttttcgggcagcgctgtcgtcgatcggcataatactacagggtttcaaacagggacggagaagccgctcgttgccatttatacgcaggaccggagcggggaacaagtgcaaagcatcgcctacagcaatgacaaaggcaggacatggacgaagtactcaggcaaccctgtcattccaaatccgggaaaaagagatttccgcgatccgaaagtcatttggcatgaacagacaaaaaagtgggtgatgttgcttgcggggggcgatcgaattctgatctatacatcgcctgacttgaagcggtggacatatgcgagcgaattcggcgaaggagagggcagccatggaggcgtgtgggaatgtccggatctgtttgagcttcctgtagagggcaggccgaatgaaacgaaatgggtgatgcaagtcagtgttggagacggtgctgtctcaggaggatcaggcatgcaatatttcgtcggcagttttgacggaacaacctttaaaaatgaaaacccgccgaatcgcgtactatggacagattacggcaaagacttctacgcagctgtcagctggtctgatatcccgaagtcagacggacgaaggctttggttagggtggatgagcaattggcaatacgcaaacgatgttcccacttccccgtggagaagcgcaatgtcgatcccgagagaagtaaaattgaaagcgttttccgaaggacttagaatgattcaggctccggtagcggagctgcagtcgatacggggagcatcgcaaacgtggaaaaacaagatcatttcgcctcgaaacggaaatttgctgaaagggctgtcaggcgatgcttatgaaatcaatgcggaatttcaagtaaataccggagctgcggccgaattcggctttaaagtccgaacaggggaaaacgagtatacgaaaatcggctacagcaaaaacagcgcttcactgttcgtcgaccggagccaatcaggaaacgtctcctttaatccgaactttaacactggaaagcatgcggccccgctggaaccggtcgctgggaaggtgaagatgcgcatttatgtcgaccgctcttcagtcgaagtattcggcaacgacgggaggcaggtgatcaccgacattattttgccggaccaatccagcaaagggctagaagtatacgcatcaaacgggtttgtcaagctgaattccatgacggttcatcctctgaaaaaagtatggggagcgtcgccctttcaatcaaatttgaccggctggacgaccgtaaacggtgtatgggccgatacgattgatggaaaacaagggcgctctgaaggagattcgttcattttatcttcagcaaaagcaacagatttcacatatgaagcagatgtcgcgataaaggatggaaatggaagaggggcaggggctctcgtgtttcgggccgatcaggatgttaaaaacggataccttgccaatgtggatgccaagcatgacgtggtgaagtttttcaaatttgaagacggctcggcctctgttattgccgaacaccgcacaccgatagaaaccggccggaaatatcacctgaaaacggtggcccgcggtgcaaacttttatatttaccttgatgatcaattggtgataagcgcccgggattcaacgtttaccgatggagccttcggtttgaatgcatgggatgcgaccgcagtcttccaacatgtttatgccaaacgatgatcatgtggctggaatgccgggcattccagcctttcctttaaaagacgctgcggaccaatccgccgtccgcacgcaaggctgcaccattgatcggcgaagaaagcggactgcttaaaaatgtgacaaagtgcgcgatttcttccggccgaatcagcctttgtatgatagaggtcggccggttttctttcataaaccgcttttccgcttcttcgactgtcaggttttcatccggatagagggtcttcagcatcgtttcaacgccttcggttaaggttgagcccggcatgaccgtattgacggtcacatttgtacctgccgctagctctgccaggctccgggaaatcgaaagctgcatcgtttttgttgcgctgtaatgagccatttcctgtgacggcataaccgcggcttcgctcgcaataaaaatgacccggccttcttttttctcgatcatgctttgcaaatacctccgcgagagccttaccccgctcataatattcacttcgaaaaagcggaaccaatcctcatccggtatctcgaaatattccgccggttcaaagatccctaaattattgaccagaatatcaacatccgggaatgctgctaataggctttgacaccctttttcagtgccaaggtcataaggggccgcttgaagaacagcctcgggaaattggcctttcaattcgtctattgtttggttgaccttttcttgccggcgtccgttaatgatgacagacgcaccttctttcgcaagtgaagcggcaatcgctttgccgattccggacgtcgatccggtcaccaacgctgtttttccccgtaaatccaagttcatcattgatccctccgttttcttttcattataaacagaacaatgtcaaacaaaacatcaattatgattatggaacagaagacaccaaaacggaagtacgcacttttaagtcatataggcacttttttgtgcctataggtataaggagggaacttgatcaaaaaaacccgccggctgtaaacggcgggcttgctgtttatgggaaattcaatcataacaagtaacggtgatatatgtatcattccctttaaacaggacgagttctgcttgtttattcgcaccatctgtaaaactgctgacatcgatcgccggactgttgcttttcggtccgacgtagaaattttttcttgcgatttcaggcgtgcttcccgccccgtcaacttcatacagcgtaaatgtaaagccgtaaaagctgttgttgtgaaaataaaatttccctccgcttgatttgatgatcggagtttgcgacgtcatgccgtatgtgccgatattatcccatacaccggcacctgctgcagtcgccgaagaaaaaggcaaaagcaaacacgccaaagtgagcagtaaggcaccgattttgctgaatttcatggcttgagcctccttttgaagtcattacatgggggattatatcatcattgccaatgaaacgaatgaggcgttactccccgacgccttttctgcacgatgcattttttgtaagcagcatccataaactgtctttcattaagacaaaagaccgggggataggcgctcattttgcatgcatatgctcttttttgctggtgtcgatgaaaaatacaaaaaatttatattttttaaaattcgcactttacaggtaggcatagtatagattatatttaacaataaaaataaaccaattgaagtgggaggccaacatgaaaaagctgattgtgtttgtcttgataggattatttgcgcagctgatagatggcgccttagggatggcgtacggggtgacatcgtcatcattgctgcttgccttcggcatcgcaccggcggttgcgtcagcatccgttcacctggcggaagtcgttacaaccgcggcatctggtgtgtcgcatataaagtttggaaacgtcgataaacaaacggtcaaacgactcgtcatcccaggatcgctcggggcatttctcggcgcttcctttttaagcaacattccgggtgagcttgcgaaaccttatatttcaatgtttctgcttgttctcggcgtgtatgtgctcattcgatttctattcatgtttaaaataggagagcaaaaaaacaatatcagcctttcgagaaaaaaagccgttcccctgggattgatcgcgggttttgccgatgcaaccggagggggcggctgggggccgattgccactcctgttttgttatccaaaaaaggcgtcagtgcgagaaaagtagtgggaactgttgacacaagcgagtttgccattgccgtttcggcaacgttaggatttttcatttcgctcggctgggaagaagtcaattggctgtgggttggtgcattgatgattggcggaattattgcggcaccgattgccgcctggctggtgcagaaggtgcatgcccgattaatgggcgttctggtcggcgggctgatcatcctcgtcaacacaagaacgcttatccattcgtggatcgatcaaacagcattatatccggttatttatattggaattatcgcagtttggatatcagctattgtctatattgttgtaaaaataagaacaagtgatcaaactgctcaagcgttcaatcagtaactctgcgacggctttaggctttcatggacgtcgccgtcaacaaacgaatagattccgatcggacaaccgaagggctcctgttagactgccgttccttaaaaaggaactgttaactaagaggattttttatttttaaatttacttatagcgagatcggcatagcaccggtctcagcttgttttcattccttttttacatctctccgtctcatttctatacaaggaatgcggaaggtgttcattaatgaacacctcccgcttgattgccgattgaatgtggattttcctggaattataatatttgtgaatgagtggatgtgaacagcctaacgcattatttcggtatacaattccgatgcaggctgttatttacaaaaacagagatggaggttggatgtatgtcttcaaaacaagaggagagcttcgccatattaactgagagagaattgtcttctgcagcatttaaagatgaggcgtatgaattttacaagcgattacgcgcttcccgtcctgtctgtcccgtatcgatgggggagctgggcgaaggctggctcattacgaggtacgatgatgcggtccatatattaaaggatgcaagagtgaaaaaaaattacgaaaatgcgtttaccgaagaagaattagagaacttctccgctctggaaaatgaagaacctttatcaaagcatatgctcaacgcagatccccacgaccacggccgtttgcggtctcttgttcagaaagcatttactccccggatggttttacagctcgaaaacagaatccaaaaaatagctgattccttattggatcaagtagaaccgaatcattccatgaatcttgtagacgacttcgctttcccgctgccgatcattgtcatcagcgagatgcttggtattccgcttgaagatcggcaaaaattcagagtttggtcccaggcggttattgatttttctgacacgcccgaaagcctggaggaatacaagtataaaataggcgaattcgctgaatacctggaatatttggtacgcaaaaaaagggacgagccggctgaggatttagtcagtgcattaattcaggcagaaagcgaaggaacgaaattaagcatagaagagctgtatgcgacgattatgcttcttatcgtcgcaggacatgagacaacggtaaacttaataaccaatatgaccttggccttgctgaaccaccctgagcaactggaaaagcttcgccaaaacgcagatttaatcgactcagccattgaagaggcgctcagattttacagccccgtggaattaaccaccctccgctgggcggccgaaccgtttacattgcacggccaggagattaagagaaaagatgtggtcatcatttcattagcctcggccaaccgcgattatatggtcttttcgaatgccgaccgctttgatattgaaagaaaggataaccgccacctagcctttggccatggcagccatttttgcctgggcgcaccgcttgcccgattggaagccaaaatcgccattcaaaccttgctgcgccgctttgaacatatagagattaaaggcgaaagggagcagatcaaatggaaaggcaactttttgatgagagctttagaagagctgccattatctttttaaatgatgggatttgcgatcagctgtgatgtgctatctgccatttcggcaagagaaggtatggaatgttttcatcttgaaaatagaacatcagacgatgagacgttcatctctatcacaaggctcataaaaaaatcgtactccccgatatgacggggagtactcctcttgccggcttaatcttctattgttattcaggttcgctttcacgaatgcctcctctcatattttcctcgcaggtttaccgcacaacagctttaactttcttattgattttaatatttgtaagtttcttgtttctgtttataattagaaacatatgttaatgttccggcacctgttgaaaccgcttgacagatgggcattcccggaatattatgtgaggctctttaaaatatactggctaaagaagaaaggtgttttttaatttgagaggattcatcaaatgggcaggattggcgattctgtgtattggcttgtttgcgtgtacttctaacaggaatgccgaaaatgttcattatgcaaaagacgacagacaaacattggatatttatacaccgcagtcaaacgagggcgaaaaacatcccgttctcatctaccttcacggcggaggatggacaagcggcgacaaaagcagggctgcttcgaagccggcattttttacggataacggctatgtttttgtatctgtcaactatcggcttcatcccgatgttcagtatgatgaaatggctgatgatgcggccaaggccgtaaaatgggtgatggatcatgcggacgagtatcaaatcgatccgtcaaaaatcaacgtcatgggacattcggcagggggacacttggccggattaattgccgcagattcaacatatttaaatcgtgtcggcctcacgccggccgcactcaattcgattgttgttttagatggccccttggatatgaaacgattcatcgaagcgatcccgtcttataaagaagtgtttggcacagacgaaaaggtgtggacaaaagcatcgccgctctcatacataaacaactcaaaattgccgccggcctatcttgtgacccgctgggaagaccctgccgtttacaagttcgcggaaaccgcaaacaaagcgaaggcaacggaatttgtgtatcaagtcaacagcttatctcacagtgatttaaacaagatgttcggctctccagatgcaccggcagaagcgcagaatctgacaaaagcggttatggcgtttttagagaaggaaaataaatagatcaaacggccgactcggcttcctacatgtacttgctgaaaggatataaacagctgttaaactagcagagaaaggccgaaaatgttaaattcggcctcttctcacacttggcacccccttactcataagacatcgatctgaaaattcccaaaatataaacaaaacattaataaaatcaagccatttgattaacaaatttacgatacgatcatatagaacttgatgattgggaaaagcattttgagagaagattaagagcaagggagatatgatgtgagaatgaaacgattaaggatgaggaagcatttactgatagctgtctgtactttggcacttcttctaagttccccgattgtaagcgatgcgagcccggcaactaaaccaacaactgcagattcgccgcaatcttccggatttttcgtagaccattacaaaaataatatctctgccaatacgacggcggaatccaatcctgtcatcggcctgctttccgaatttaataaactttggactcccggaaagacatggaataccggtactaaactgaacagcagggtgctggatgccaacattcaaaaagtcgtggatattgctgaacgccgcacgatgcttgaggaaaatgctgcctattttgatgatcggcggagccagagctacagtataattgacggcctcggcaagcttgccggcgtctatcgaatgaacgcgggagcgacgacaacgatcaccagcattccggcagatgcctcgattagaaaatacaatgatgaaggaaccaattcgggcagcaccagctctgaacttggaaatgtcgtaagtttggtcaatactttacgcggcaactattcttcatcgaatccggctaaaagctatttcaactatccccgcccgtttcgctggaaagacaattcgatcattgttccaacgcttatccccgtcatcaatcctgatccgaacaaagacggaggttttccaagcggacacacgaacgccgcatatctcagcgcttttgctatggcctatgcgataccggagcgttatcaggagctgctgactcgcgcttcagaactcggtcataaccggattgttgccggtatgcattccccgctggacgtcatggggggacgagtaatggcaacagctttgtctgcagcaatcctgtctgaccccgcaaatgaaagattgaagaaaacggcttttgatgaagcccgccgtaaattattaacgcaaaccggtacagctgaagacagatacagcgattatgagaagaataaaaaacaatatacggaacgattgacatatggatttcgacaaatgaacaaaaccgccaaaccaatggcagttccaaagggagccgaagtcctgctggaaacacgttttccttaccttgacaaaaagcagcgccgttcggttttagccactaccggtcttccggccggctaccctgttcttgatgatcgagaaggatggggaaggcttaatctcttttccgcggcagatgggtatggggcttttaccaaaaatgttaccgtgaccatggattccgcaaaaggcggcttccatacagccgatcgctggcgcaacgacatctccggcaccggaaagctgaccaaaaaagggacaggcgctttgaagctggaaggggataatacatattccggcggtacacggattgatcaaggaacacttgagggcggttcggagacagctttcgggagaggtgatgttgcactaaacggaggcatccttaaggaagatgcgccgggaaaactgatcatcgaaggagactacaaacaatctgctaaaggaatacttgaacttcagctcagcggcaaaaaagatcagttgaaaattaagggaaaagcaagattgaaagggacattgcgtctcaattttacggacaattacgtaccggctgacggatcggcgatcataaccttccgcaagcgtcatggatcattttcttccgtcgagaccagtggattgccaagcaagtataaagtgaagatcatctataaatccaacagtattcagttgaaagttgagcaaaaggggagaagctgatctgcaagaggattcactcaaaagctgcaagctggcgcatactgccgccagcttgcttttagttttgatgaaatcacagccagaatggctgtacatcttgaatggggaatcttaaaaaatagtcggcaccattcccccgtccatacggatcggggaccctttaaatgcggatgcatagggactgcatacaaatgcagccagtctgccgatttcaataggcttgataaatcgctgtatttcggattgaggcaggtttgtcgtcataaatttcttctctttttctgaaaaagtcatcccttcatcggggtacattccctcaatgatttgcttcacattctcagagagcgtcggccccggcatgatcgtattgactgtcacttctgttccgattgttaattttgataagctttttgacaatgataatagcattgattttgtcatacaatactgaggcatctggcctgaaggcatcatcgcttcttcacttgcgataaagatgatgcggccaaaatcacttttcagcattttaggcaaataaaatttagataaaccgtttgcagccagcacattggtgcggaagtatttttcccatacttcatcgtcaacgtcctcatattgcatcagttcataaatgcccatattgtttactaaaatatcgatttgagggtgttttttaaataaagcttccctttgcctaatatccacaatatcagccgcggcgttttggggaaaggtgtcaggaaaagctgattttatttcattgactgttcgttctgcctcttcctcatttcgtccgttaatgagtacatgaacaccttctttggcaagttcaatagcgatggcttttcctatacctttcgtcgatccggtaactaaagctgttttattttttaatcccatatccattaaacatttctcctattctagttaaatccattcagccgggtcttcttacgccaattagaaggagtctcgccttcccaaaggcggaaggcccggtagaacgagttctgatcttcatatccgatcagaatggccacttctttaatatcgagcgaagggtctgccaagtactcccgcgcctgctcatgtctgacttggatcaacagctgtttgaagctagtgccttcgtcagtaagccggcgctgcaaggtgcggccgctcattcccaactcgctcgcaacagtctgaatgtcggggtgccctcctggaagcgtgcgtttcatgatccacttgaccgctccgctgattgaaaggctattttgctgatcattcaacgattgatccagcacgggagtcaaaatctccagcaactccgcgttatacgagacaaaagggcggtcaagatctcctcgattcagcgtcagccggttccgagctgcaccgctccggatgcggcagccgaagtatgcttcaagcgcctgcatgtcgcccattgggtgtgcaaactcgaccgacttcgctgtcaacggctgacctgtgccccggcgcccgagttccagaagaaatgccagtgtaatgccaatcaagagcggcggaccgggtagcttatcatccaaccattccagttcgattgcgcagtgctcatcttcttcggtgatacgcaggctttcaggagggcataattgtttgtagcgggccattcgttttagcgcgccgcggtagtcacgggcatggtaagccgctaatacggccggagggtaatgtgccggctcaaagccggtcgcaagcttgatgattcctttggaaacgtcatcaacaaggtcggaatacgcctgccagatcgcgaagtattgggcggcggtgacaactggttcagtcatcacggtgagcggcagccgggcttttcgaagcacatcaggggcgttaattcctaattgacgcaatcctgcccaaaatcctgccgggaatttaattcgagtatgagacatcttgagcactcctttaactttctgcaccttcgctcgtttggtcgtcattctgtccagccttgttggcgggacagttataactttacctaaccattgtcgatctgtaactagcaaagagcgacatttaacttgccgatcacgccgaacgtgtcagcccgccatatgcgtacgaaggctgtgacaggcaggcgcctttaatctatcatgtccttcgaataggaggggattcaaacagcacaaacatttcttttccttgaatggacaaattaagttctataggacaacaagcggggaaaatctcccggctgtaaaatcatcccttcccgatagcgggatttccttttcccatcacatgttttcttgcaatgaaaaagaggaggacggcaacaaaaaactcggaaagcggcaaggatagccaaactcccgtgacgccaataaactttggcaaaatccaaagcaggatgaacagggacacgaagcttcgcaatataatgataacaaccgatgagccggcccggccaatagattgaaagtaactcatatagacaaagttatagccaaggaaggtatagccgataaaaaacaggcggattccatcgatggccagctgctggatttcggttgattctattccgaataagcctacaaggaatggggcagccccccagccgataacgagcaaaagtatgcccaggattacggcggtcttctccccaatcttcatgctgcttttgatttgttcggtttcttcagcaccatgataatagctaatcatgggctgaagtgccatttcaatgccgaagaaggacaggaacatgaacccgtgaaggtagttaatgaccgagaaggcagcgactccttccgtgcctgccaggcttgccattgccaagttgtatcctgtaacaaatacgaggagcccggcctctgccagaaagcttggaaacccgatggcaaagatgtgcataagggatttccaagaccactgaaacgccggccttctcagttgcgcttgacggttgaagaagtgcagggataatacaagcagtccggcgaatccgccaagcaccgttgaaatcgcagcgcctgttacccccatgtccaaaatcatgatcgtataaaaattcagaatgatattcacaatcgatgtcgttgcaagagccatcatcgaaagcttcggactgccgtcattccttacaaaaatacttaagacctgttctaatgtaatgacccagccgaataaaaacatgacacttaagtactctatgacaaaagaagaggtgtcggagttggcaccaagccatatcgaaatggtttgaatgttgagaatcccgaatactcctaaaagcacgctgatgataagcgccaagaagagagccaatgaaaaaatgctgctggccttcttggggcgattctccccgatgctgatggagtactttgttgctccgcctatcccaatccaaagagcgatggccataatgagtgaaataaccggataggaaaggttcactccagccagtgctgcggttccaatgccattgcctacgaacaggccatcaattaaaatattcgctgacatcaggattaatccaagcgttgcagggacgaaatatttaaaaaacacttgatttactggtaatttcatgagctgctgatgtgtttctgtcatcatgtattcctcctataatgagctacaggagtattctaaaccttcaagttacttgaaggtcaatcaaaactctttgttaccggaatttggattaaagtgacataacgagctgactccttgatcacagcatcatcaagaaatgagatttcaacagggattcccgccagctcgtattccttctctttcagctggcttaaaacgagctgataacttttcctgatgtcctcgtagggaccaatatgggggtaactcgcatacaacccttcgtttaaatagtcttcactgtcttcctcgtgcagcaattcaaatacgccgatatattttaccggtccttcttgcttcaagctctccatatcaacgattgttccaatgtctccggtgaagaagccgttattctcaatcgactggcttgaaagcgtttctttatcctttaaataaatgtcgtcgccttcctccatcaggtcgacaggcttgtcaaaatacaggtaggaaatagcccgttttgggaaatactgaaatgttaaagcaggatgttcggcaagttttattccttcttcgattgtggaaattttgttctcgattctcgccgcgttgcgttggagacgaaaaatttccgctctgacttcctcaagctttttcttcaaaatttccatcgttgtttccggagtcctttgatctaactgatgctgaatatcttttaacgaaaatccatttttccttaaaaaaataatcgtatccaggatctgaaattgttcaacaccataatatcgataagatgtttcaggatcggtatactttggcctgaacagcccgatttcatcatagtaacgcagagtcgatgcaggcagcttgaaaagtcttgctacttctcctacacggaatcgattgttcatcatgtttcacctcatctgttcgttttagtgatatcaccaaatacagagctattcggttatcggaattatgtattaagtctactattgacattaggtgaaaatacatgcctggtcaataaggaggcccagtatccctaagcaatctgttcgatgcaaaacaattctttttgccaaaccaatctattgaggatttttaaaaataaatgagggctccatcattggaagccctcatttgccatatttttttcactgcgaataaaaaaatctgtatacagtttgattaaagaagctcattcaggaaagctcccggctaatttattgccgaaccgctcttgttctgatcgaacgaaagcgcgggtgttctgccagtatggaacgcttcatttcttgtacaaccgggtggtctgactttaaaaaacgatgtttatcgtaaagtccggccaattggccgtggtctaatacacctagtgtatcactcaattgataggcggcttttaaatcatgtgtgataaaaaaataagacattccgaaatcgtctttgagctcttttaataaacccaatataagcgtttgggttaccatgtccaggctgctgacagactcgtctaatacgatcagcttcggcttgagcgagaccgctcttgcaatattaatccgctgcaattggccgccgctgaactggtgcggatattttgttaaatccttttcagttaagcctactctttccaagagctcgataatggtccgttttttctcagcgattgtgagcctttcatagttttctagcggttctgctagaatttgttcagccgtcattctcgggttgacggaagaataggagtcttgaaaaacagcttgaaggtcgcggcggattttccgccggattgactgatctgctttatagagatcatgtccttgaaaaaagatttgccccgattgcggccgctccaaaccaagcatcacttttcccaatgtgcttttcccggctccgctcggtccaaccatgcctaagcatgcgccttcctcaatcgaaaagctgacattggaaaggacttgtttcgattgaattttccacttgaataatttgcgcgctgtataatgatgagtgacttctttcacttgtaataaactcacttgttcaccccatctcaaatgccggccttcctcatactgactcaagtcgcaagttgatccaccggcaatgtcaaccgtgcacttaatagcttcttagtatattcatgctttggttcatcaaacagctgaaacacatctctattttctacaattctcccattctgcatcacagcaacttcatccgccatttcagcaataacgccgaggtcatgagatataagcaaaatcgccgtgccgaagtcagaacgcatgccgtctaaatatttcagcaccgtcttctgattatacacgtcgagcgcagtggtaggctcatccgcgatgagaatggcaggctttaagcatgatgcaattgcaatcatgacccgttgaagcattccgccgcttaattgaaaaggataagaatgtaaaagtttagcagggtggggtaggttcacatgatgcaatgcttcggtcgcaagctctttcgcctgtttcttgctaaaagatgtatgagagcgaatcgattcggtcatttgctgtcctatcgtaaaaacgggtgtaaaagcgttcatcggattttgcatgatataggcaatatctttgccgcggattttacgcatttccttatctgctaatccgttcaattcacggcctcgcaatgcaatacttccttccaccttagttgtttttggatcaagcgtctgaagaatagacatgcttgttaccgtttttccgcaaccgctctcaccaatcagaccaaggacttggccgcgcttcaaatcaaaattgatgtcttgcacaagggttgaatgtcctttttggttgttaacctgtacatgcaaatctctgactcgaagcaccgttgattgttctgttcccaacttcctcattcctttttaaaatcgacgtttgacaccgtattgatctgataaggcttcgcccaataaattgaatgtcacaaccacaatcatgatcatcacccctggataaatcattaactcgggattcgaccgaatatacgatttaccttcatgaatcatcgctccccattcagccgccgggggctggacgcccaagccgagaaaagacatagccgagatatccataatggcccagcccatttccaacgtaccgatgacgacgaggggagggaggacattagggatgatatgatttttaatgattttccattgtgaagatccattgatttttgccgccgcaataaagttctcctctttcagactcagcaccattcctctgaaaattctcgcataatagacccattgcacaagcatgagggccagaatgacttgaggaagtccggggccgaaaatgcccacgaggccaagaactaaaattaagttcggaaaggccattacaccatcgcagcatctcattaacagctggtcaatccagccgcctttataccctgaaatcgtcccgacaatgaggccgataacgagggaggaaatgaaaataagcatcgcgaatcccaaagaaatccgggcgccgtacaaaaggcgggataagttgcatcttcccagatgatcagttcctaaaggaaattcccaggatggaggctgcagcttatataccatatggacatcagcaggatggtgcggcgcaatccaaggggcgaatacagcgataataaaaaggatggttaatatagtggtgcataccgtaatcactttttggcctttgaatatcctgcgtatacttatcatcatcgatgctgcccttctttccttgaaatgcgcgggtcaatatacatttgaatgagatcaacaattaagttgctcaatataaaaaaggtagcggctaagaacacatagcattgaatgacagggatgtcccgattgaaaatggcctcaataaaataacggccaaagccgggccaagaaaaaacgacttcaacaataattgtgccggtaagcagcttgccaagattcattcccagacccgtaatcatcggagaaatggccattcgcaatacatgtttggccataatgttcaacttcgctattcctcttatgcgtgcaaattgaacatatggttcctgcaggttttcgatgacgcttgcacggagcagccttgtatacatcgcaattaaaggaagcgccaatgtcatagacggcagtacgagatgctgccatgtcccagcgccctctaccgggaaaaggtctaattgaacagaaaagaaaaaaaccagcatataccctaaccaaaaagttgggatggatgccccgaaaaaggaaatgaagcggctgatatgatcaactgcaccatttcttttgattcccgctaagaagccgagcggcacactgacaagcaccgcaatcaataaactcccaagcgcaagttcgaccgttgccggcattcggtgtgccacttcgtcccaaaccggctggtttgaaacataagatatgccaaaatcaagctggcatatcttcaaaacagagtttacatattgaataaaaaatggctgatccaagccaaactcatgtcttttttgcgctaaaatttcatcagttggctggatatgcgctgcggctaagtatgcttcagctgggtcaaccggcgagagatgaatcattccagttgtcagaagtgcagctaaaagaaaaactggaataatcgacatgattcgtttcaatatatagttgcccataaaagcctcctagtgttgctgcttgacgcgaatgcctgtaaatggatgttcgtcacggttagcagggaacgtaaagtcggtgatattcttttgatatatcgccgtctttttaatgtaagaaacaggtacgatggctccctggtcttgaagtgattttaaaatagatgagtaatgctcctgccgctctttttcatcagtcgtttgaggcacctttgccatctgtttgattagctcgtccttgtttggataggctgagatcgcttcattaaatccgaatcctttggacgcgacaatgtttaaaaatgtatgcgggtcataaggcgcaccatagttgctaaagaagttcatatcaaactcatttgccttaaaccgtttgacttgggttgccaattctacgccttcaagattcagctttaccccgatcgctgcccattctgcctgcagcgtttcagccattgttttttgaatggattcagctgaatcatacattaaactaaattcaagaggctttccgtctttctcgcgcacggtcttgccattcggaagcttccagccggccgcatctaataactcttttgctttttctgtatcatagttgatttgctttacatcaatatcagacgtgtatgggaagtctgtcggcaaaatatgatctgctttttcttctaaccctgaggtgatgcctttcaccatggcttctttgtcaaaaccgtattgcagggcctgccgcacgcgctcatcagaaagctgttcttttttcgtattcatgacgagctgtctcgtcgccacgggttcagaaaggcttgtttcatattgacctgtcgattgcagctgcttgtatgcatccaaactgataacgccttcgccgtaaatgaggtcaagctcgcctttttcaaatgctagcacccttgtttcggcatctgggataactttcactttgattttctcgacttttggcttttcaccccaataatgttcattgcgtttaaaaaccgcatattcatcagctttatgctcttccaatacccatgggcccgtaccaaccggtttttcgacaccctttgatgtatcgccgtcctcagggaagcccgcttctcccaaaaaccggaccggccgtacaacggctagttcctgaatggtcgggtagtatggttcagtcaattttaatttaaatgtatggtcatcgatcacttctgtttgggctatttttgaaataaaccctaaccagctatgtaattcagtatgttttaaaatggagtcaaaattctttttcacaattttcgcatcaaacttcgttccatctgaaaatgttacattcttacgcaaatgaaacgtatatactttaccgtcacttgatatatcccaagattcggctaaatgcggtttaagctttcctcccgcttcataggtaaccaaaggttcatataccatcgactgggcaaataattgggaaggattatacacatgcggattcatttcgcctatatctctaggccaagccattgtgaccaagttttcatgagttttctctgttgaatttcctgaggttgtacatccggctaataaaatagaaaaggcgagcattaatataaaaataattttaattttcaaactaatccttccgctcatcatgctttgtttcctcctaaatgaagttgataatcattttcattttatgcagggggcatacccttgtcaatgtaagatataggaactatctaaatgctgcggaatagggagcggcggcaacccatgaagaacgagcggaaagggggaagcggcaaaatcgaagtgggcgaagcatgaactttttattaaaatggattgtaaaaatggagcaatcaaagtacacttaatgataatgataatcatttgcgtttggtgtttgtgaactcatgacatataccgggagtgaagagcgatgagcagaaatgaattgtttgatgtgaccgttatcggcggaggtccggctgggttatattccgccttttacagcggactgcggggaatgaaggcaaagattattgaatatcagccgatgctgggcggaaaggttcacgtttatcctgaaaaaatgatctgggatgtcgggggattaacgcctatttccggagccaagctgatagaacagctggtgcagcaggggttaacgtttcatcctgaagtgctgctgaatgagaaagtcgaatcgattgcccgcaatgaagaagggttgtttgaattacatacggctgcctcaggtgtgcatctttccaagacggtcatcgttgccgtgggcggcggcatcctcaatccgcaaaagcttcagatagaaggcgcagagcgttttgaagtgtccaatctgaattatacggttaagtcactgcagcattttaaagataaaacggtcattgtatccggcggcggcaattcggctgtcgattgggccaacgaactcgaacctgtagcgaaaaaggtctacctcgcttaccgcaaagatgcgctcagcgggcatgaggcccaggtggatcagcttctgaacagctcggtgagctgcttctttcatacagagattaccaagctgatcgcttcggaagatcatgaggtgatcgaacgggtcgagctcacgaacgctcaaacaggtgaggtgatggaactgcctgtcgacgaggtggttatcaaccacggatatgaacgcgacacctcacttctggagaacagccgccttgatgttacccgagtggatgactattatattgcaggtacttccaactgccagtcttccgtgcccggtctgtatgcggcgggggatattgtgcattacgaaggcaagctgcacctgatcgccggagcgtttcaagatgcggcaaacgcggtcaacagcgccaagcgatttatcgatcccgaagcgcacaagagtgcgatggtgtcgtcgcataatgaggttttcaaagagcgcaaccgcgagcttgtcaagaagatgttcgtgtagaaaaggaccgccgtgggagcggctgattcgtcgaggggatcttggagatatgccaagattctctttttatttaaaccagcctttttcctttgaacgggtaatggcttcgatccgatttttgacctcaagcttttcaagaatcattgagatataatttcgcacggttccgcttttgatgctgagttcttgggcgatttcttttgtgttttttccgtcagccacaagttcgagcacttctttttctctatctgtgaggggattggcttcactgtacatgtcttccatcaattcaggcgcatagatccgctttcctttcatgacgctgcggatggcgctcacaagctcttcgcttgggctgtcctttaacaaatagcctttaacacctgctttaatggcccgctgaaagtaaccggggcgggcaaaagtggttaagataataatgttgcagcctgtatcctttagttcctcagcagcttcaagccccgtttttcccggcatttcaatgtccataatgcatacatcaggccgatgtttttttgtgaaatcaacggcatcctgtccggttgtgcctttgccgacgacttccatatcatcttctaaattcagtagtgatcctaaagcgcccaagagcatctgttgatcttccgcgataaatatactaatcatgcaagccatccttttttgtttattttgagttattaggaattgacatggtaagcttggtgccgttttttgtatcaatgtgaaggcttccgtttgcaaattcaagccgttctctcatgccaagcaagccgtgtccttttgaaaagtacttctcttcaccttgaaacgttccatcgtcagtcactgtaatgacaacttccttccagagctgctggatgtcaatgcggcaggttttagcctgactgtgtttgacgacattagtgacagcttcctttaagcacatgctcaatatgttttcattaagcaatgagatattttccggcaatttttcttcttcatagatgaacgcaatgtcggctgcttcaagaatttgtttgatgttgacaatttcatccttgagccggatgcctttcatggaggatacaatttttctgacttcatttaaagaagttctcgcagtttgctgaacgcttttcagttcacgcgcggcttgatcgggatctttgtaaattaattttctcgccaagtcgctttttaaaccgatcagagacagcttttgtccaagtgtatcgtgaaggtcgcgggcaatccgctgccgctcttctaattttaccaaattggcaatccgttcattagcatactcgagtttttcttcgaggcgttcgcgctccttgcggtttctgatactgaacggcaataaaatcgcgctgatgagagtgatgaccacaaaaggaatttgtgtcagaaaaaattctttttttaacacgagactgaagttggcagcgacggctgcgcttattaaatgaacgtaatataaaatgtgaaaaggggctcgtttttttatgttccctataaaatacgcgataaaaaaagcaaaataaatatagctgaacagcataatcgaggcggttgaaatgccgattaatataaacgcccacaaataaatgtcccagccttttgagacaaaagcaaatctgtataccgcaaaaaataaaagtgtcaaaatgatgccgacgacgatgacaagggtagatgatgattgcatgataaagtagaagggcaggatgaaaaatatcgtccatatatacggcgagatcccgttaagtttttgaaatgcaaagtgctttttgaacatgatataacctcgttttcagcttttcatctttagagtaactttaccattgcctgagccggattgcatcatccgacaataaataaggaagccttcttgttgatataagaagacctcctcatcgtcaggcgttctttcgcagcttctgtttttccgttgaatcctgcggaagaggggaagatgtttgtttcatgtcccgaaaggttacaaactgctttttttcttcatcccaaagccggaacgcgagtgattgcaggcttgtttttaaagtgatggtcgggacgttttttagtggttcgtgctgctcatgtgcgatttcaagtttatagttaggcacctttgggctcagatggtgaacgtggtggtacccgatattgcctgtaagccattgaagcagtttcggtagtttataaaatgaacttccttccacagccgcctgaacgtagctccagttttcatccgcttcaaaataagaatcttcaaatgtatgctgaacataaaacagccaaacgccgatcgaacctgagatcagaaagatcggaccctgtacgagcaagaacgattgccagccaaagatcaggcagcaaacagcagccaatgccgcgattgcaaggttggtaaggtatgtgttcacacgttcctttcgtcttgcaccttttttgttaaagcggtttgtgatcagaaagacataaatcggtccgagaataaacatgataaacggatttctgtaaagtctgtatgcgatttttgtgcgtagaggtgcggctttatattcgtttaccgtcagcagccagatatcgcctgttccgcgtttatccaggttgctgcttgtcgcatgatgaatcgaatggctgtgctgccattgaagataaggaaataaagtcagaacgcctgttaaaaagccaagaatgtggttaaggcgtttttgtttaaaaaaggaaagatggcagcagtcgtgaaaaataatgaaaattctcgtcaaaaaccctgcggcaatcaccgttattcctaaagtaaggagataggagacattgaggctgaaataggcaagaaaccacagtccgaagaaaggaataaacgtattcaaaagctgaagcagactgttcttggtatcaggctgtgcaaacgcagcaacctgttttgtcaactgtttttgtttatgggcaatggtttgttcagtcatagtaaagttatcctctcataaataggtcttaaattaagtttacggcacagagagatgtctttgtagtagcacacatcatgcttcaaacatgacacttgtcatgtttccttaactcgaatggatataagaagattgacaatatcatgatggggcaactccgcatggtaaggtggcaagcaggtgaagttaaggaacggctaaaacgtgcgatgattgattaatgaaacaaagttcttttacaatgatgtaattgatgatcatatattagtcatttagataaggagtgaattcatatgtcacgaatggagaataaaacatttaattgtgaaaaggagttgacgctcaacattatcggaggaaagtggaaaatgctgattttgtggtttttaggaaaagaaggtacgaaaagattcggagaattaaaagccctgatgcccggcattacgcaaagaatgctggtgaatcagctgcgtgaattggaagaagatcatattgtacatagggaagtatatccggttgttcccccaaaagttgaatattcccttacaaaacagggagaaagtttaatgcctatattagaggcgatgtatgagtggggtaaaaattatatagaaaccaacttttcaaaagatgacaaatagaataattgactttgagatattgttctagagacagtatctttttctacaccatatgaggaaaagtatagtatgtaaaaaaaaagtgcgtactattaaaggcattttccccttgttatacttttgatgtaacagaaatatcaaaagagaatcatccgcggaattcttaattcaaacaggagtgattgtaagtggaattacagttagcattagatttagtcaatataccggaagccatcgaagtagtaaaagaagtagaagaatacattgatattgtagaaatcggtacgccggttgtgataaatgaaggactccgtgcagtgaaagagatgaaagccgctttcccgaatttgaaagtgctggcagaccttaaaattatggatgcggcggggtatgaagtgatgaaagcatcagaagcgggagccgacatcatcaccattttaggggctgctgaagatatgtctattaaaggcgctgtagaagaggcgaaagcgcaagggaacaaaatcctggtggatatgattgggattaaagacatcaaatcgcgtgctaaggaattggatgagcttggtgtcgattatatttgtgtccataccggttatgaccttcaagccattggccaaaattcatttgaagacttaatgacgattaaaaatgttgtgaaaaacgctaaaacggctattgcaggcggaattaaattagacacactgcccgaagtcgttaaattaaaacctgatttggttattgtcgggggcggtattgcaaatcaagacgataaagctgcggcagccgcaaaaatgaagcagatgatccaataaacatgaagacttatgattatgtaaaagcgatcatcgcagagcttgatcatgcaacgtctcaagatcaatcggaaggaatagaagacttaatatccactatcatgtcttctgaaaaagtgtttgtttccggtgcaggccgctctggtttaatggggaaatcatttgctatgcgattaatgcacatggggatcaatgcgtttgtaacaggggaaaccgtaacaccggtatttaccgaaaaagacttgcttatcgtgggcacgggatcagggaaaacggaaagtttgcttcatatggcggaaaaggcaaaagatatcggaggcactgtagcaacagttacgatctctctagattcgccgatagctgaaatatctgacctgatactgcagctgcccggctccccaaaagatcaaacgacaggcaataaacagacgatacaaccgatgggctcgctttttgaacagactcttttattgtattatgacgctatcacattgcgaatcatggaaataaaagggctgaatactcataacatgtatggaaatcatgccaaccttgaataaacaggccttcatgtaaagaaagtcaccatccgctatctcgggtggtgatctttttttaaacatataatttacatctttattatgattttaaaatatgaatatcgtaaaataaaattccggtggtacagggattctaaatgatatatgaagaaaggagcttatcatgcttacaagttttaacctgattgggtttatccctttaattgtttttgcagctttgatcatattcgggttgagaaagcttgtactttctttaagaaataagtagagtcagaatgcggttcttcgcaatttccgcttcaaccgcattccattcaaatcaataaccccgcaaacaggacacagccaagcccggtgacagaaagtaccgtcgttaatagcgtccaagtttgaaaggtttccttcatactcagtcagaaaaattcttttaccatccaaaagcctgcatcattgacatggcaggcaatcacgcttcccgcgccggttgccagcaccatcaaggccggatttacattccctgtcgtcatgaggggagcaaccattcccgcagtggtgagcgccgccacggttgcagagcctaaacacaggcggagaacggcagcaatcatccatgcaacaagaagaggcgacatattggtttggctgaacagatccgcaacataatcaccaacgccgccgtcaatcagcacctgtttaaacgctccgccgcctccgataattaacagcatcatggcaatctgtgaaatggactgagataaagactgaccaatatcctgcatgggaatcttcctcgcatatcccattgtataaatggcaagcaaaagagaaagcagcatcgcactccccggtgtaccgataaattcaatgatttccttgcctttcgaatctcctttaaatacgaaagaaaaaatagtcgtaatggccataaagataaccggaagtaatgatgtgacaacactgattgcaaaacccggtgtttcatctagctgaaattcctttctcggccccaaagctgataaatttccgcttttgagatatgcattcggaaacctcttcattgcgaattgattaaatagcgggccggcgaccactgtcgtcggaatcgcaatcatgataccgagcagcagcacctgcccgatatcggcgccgtaagcgactgaaatagcggtgggagccggatgcgggggcaggaatccatgagtgacatttaaggcggctgccatcggaattccaaggtaaagaaaaggcacatttaattctttcgcgatcgcatatacgattggaattaacaaaacgaggcccacttcaaaaaacagggcgattccgatgatgaacgaggcagtgacgacagcggcctgaattctttttcttccgaatttgtcaatgagtgtaatggcaatccggtagccgcctcctgcatctgaaacaagccttcctaacatcgcgcccaatccgaaaaccagagctaagtgaccgagctggccgccgattcccgcttctacagaaagaacgattttgtcgagatccattccaagcccgaccgccactataaacgaaacgatgacaagtgatacgaaagtatttaatttgactttgatgatgagaaacagcagaatcaaaacacccatcacaacgatgaaaatcggcatggcataacctccggggaaaaagtcaatttgaccggaacactaaaaacgtttttcaatcatattaaaaaacaccttttgatcatattgatgtcatattttgataaactattatgtatatactagtctcctgaagaatgggtgtcaactcatttttaatgatgaagaccctgtattttctattctgataaacgagatgaatgaatgatcaattgttgaatatattttggttatgtgttatgtttttatcaagttaacagacatcatttcttgttattttgctaacgaaatttaaaatgatcaaaaaggggataaacaaatgccattactacgtttcgatctaatagaaggccgtgatgaacaagcattaaaaaaattattagataccgcacacgatgcgatggtagaagcgtttaacgttccggagaaagaccgctatcaaattgtccatcagcatccggcgaatgagctcatcatccaagatacaggtttgggattgaatagatcaaaggatctggttgtgatcagcatcaccagtaaaacaagaacagaaagtcaaaaagagaaattgtacgctttacttgctgaaaagcttgaagcggaatgcggcatttcacctgaagatgtcatggtgtccatcacagaaaatggagatgccgattggagtttcggcctcggcgaggcgcagtttttaactggaaagctgtaagcgggcaaaaggaatgttgacagggacatctgaatccctccagaaaagcttaagctgctgacgagacgtcagcagctttttttctttatatttctccgggttttcgcttatttgctcttggccatttgtggtgcatcacatattgagtcatcgtgttaaaaataaccgcccattggttttcggtgagcgttccaacggttttttcattgttaatttttagactttttcttaagtgtttcatttgacgcggagtaaaaattccgcgtaaagcaacacagaaaggggcttgcggctcctttagcgcatattcggcaagcccaagaaacgcaatgtaatgtttatgtgatagaggcgcgtctttttttcgtgttattctgaccattgccgagtccacttttggagggggagaaaaatgctctttcgatatttctctgacaatgccaatatcaaaccacattctccaagctaaaacataggaatttttaatgaattttgatgtgaaacgtttagcagcccctttttccattacgatgatccctttttgaaatccgcttgcaggattgttcaagagcattttcatgatgggagttgtgatggcatagggaatattagagaccaccacaaacttttcttttggtaaatgaatcttcatgatatcttgatgaataattttcgtatttggatgctgtgctgttttacgtgtgagtatagcaacgaatttagaatcgttttccactgccaataccttaccggctttttgacttagcatagttgtcaaagcaccttttcccgctcctaactctaaaaccgtatcgtctatgctaatatttgcccgatccacaatttcttcaattaattttttattatgcatcaaatgctgtccggaaaaattcggatattccccgcggtttaacttttttcctctgtacttatgattttttttcttcatgtttcctcttcctctcatcataaaaaatcacaggcggtctgcctgtgattcagagtaaagggaagagccatcctttaaggatgaatccgcggtatttccataaccaaataagcctttctcagccgttagaaaaaaaggattaaacaaaaaagaaaggcagaacgatccgcctttctacaagttacaaattttatatgcaaattgaagattattaaaaaaggacagactgatcccgtttactctgcatacacaaacagagcctttgaacgtatttaattactggttcaaagttgggaaacgcagtctcattgagtgtgtcattttttaataatcctcctgaaaagttaaagttacgatctcattgtagggcattctttggaaaacgtcaacagctggaattttctcgtcccttacgaatatcgcaggaggccatcaggcaaggcatgtgtgaagaaacgggagtcaacgaaacgtcttcatcagcggccggcgatgacatgtcgttttcagacccaaaaaagccgccatgttttgattggcggctttttgaagactaatcaatcggaattataatcagatcaagaagcaaggtgcattaatgtcgagttcttttaaccagcaaagcggccttctgtattataaatcccgctattaaaaatacgactagcagcaatgtgatggttgctcccggaggtgtaccccacttataagaagaggtaagaccagagagaatacttaaaagagcaatgatgatagaaaccgaaaaaacagctgtaaagcctttgaacagccgaatggcaaatgccgctggaagcactaataatgccgacacaagcaaaactccgattgttggtataatcacagcgactgtcattccaactaaaatgctgaatgaaagagaaagcagccgaacatttactccgcttgtttcggctgtatcctcgtcaaaagtcattaaataaagctgtcttttaaaaataaagaaatataataagacaagcagcgtaattccgcccataatgtaaagctgttcaatgctgatcgttacaatagagccaaataagtattgctcaatattcgtcgtcattccaccctcagtaacacttaataaaaagagagcaaaagaaagaccagcagccattaaaatggcaatggagacctcggaatacgtacggtaagctctcctcatatattcaatgcctacggctccaactgttacaactaaaaaacttgataacgttatattcgtatggacaaagaaaccgatggcgacgccagcgagtgaaatatgagatagagtatcggccatgagagcctgtcgtctgaggacaagaaagaccccgagtaatggagctataatcgcaattaagcatcctgcatagaaggctctttgcatgaattccaaatcaaacatttccatctgctgttctcacccctctctaaacgaatagtttttgttaaatatggctccgcttcgtcttggtcatgggtaatcatgataacggtttgatgatgttgttgtacttgccggtccatcatttgataaaaggaccggcggctttcaacatccatacctgttgtgggttcgtccaggacaaggatgtcaggttctgaagccaaaattctggcaatacaaactttttgtttttgtcctccagataaatggccaattttgcgatgacgaaattcccacattccgaccatcttcagggactcctctatttttttatgatcttgttcctttaatttgctaaaccagcttcctttcttgtaccgccctgagcgcacaagctcgagcacagtactcgggaaccctgcattaaaagaagcaatttgctgtggcaagtatccgattttcaaacgttccccgccaggattggctgcactgatgttcacacttccatgccaaggctttaacaaacgaagcataaggcgaagaagcgttgattttgaggccccgttagggccggtaatcccgacaaattctccgctattaatggtgaatgttatatcttccaatagaggtgtatgctcatagccgtacatcacattgtgtaatgaaataagttccaatatcattcttacctttccatcaaaaacaagttgcgtgtctcatcattgagataatgacgattctaactgttttaaattatttttcattaaatcaatatagtccagcccttgtttttgctcttctttacttagtccttccaatgtatggagcacttcagttttagctccaatttcatctgctaatgttttcgcaactttcggagaagcgagttcttcaaagaaaatggttttaatatggtgtttctgtgcgaacttttttaattctgcgagtttagctgcacttggctcttgttcaggagaaagacccgcgataggcacttgtgttaatccatattgcttcgttaaatatccgaatgctgcatgctgtgtaatgagctctttttttggaacatcttttaatgttgacttatattcttgctcaagatcctgtagtttctgcaaaaatgcatcgcgattcttttcataataatctttattgtccgggtctgctttttcaagcgcttttgtgatattttttacttcctgctgggcaaggacaggatttaaccatacatggggatcatatgtatgctcatttccggaatcttcatgttcttcttcctcttctccgtttcctttcatcagttcaatgcctttgcttgcttttacaaaagcagggccgttttttcccacgcttttttcaatagaaggttcccatgtttccatataaggactgttataaaccaggacatctgattccccgatcttttgaacatcttttggggaagggtcccattcatgaggctcaacagtagatggaattaaaaggtcaacatctgctttatctcccgcaacttgctttgtaaactcatacattgggtaaaatgttgtggtgacctgtaatttttgatgatctgatgaggggccgtttgcttgttttccctcatttccagaacatcctgcaaatagtgaaagacaagttgccgcaatcaaagcagttgtcatctgttttttcatgtttattccttctttcttaaaaagtattcattcgttcattaccattacttgtggttgatcattcagatcaataacacttaacttaatgaactaattctatattaaatcataatcattacgatttgtgaagtgtttttaattgttcagggtaagatcggcagtatcacaaccttttaaaaaatctaaacagggcgggacagaccgaacaatcatcatgaattgcttctttctcttaacattgaaatgatagatgtgattgtttatactttaaattgtaaatcgtaacaattacgatttaaaaataactcatgtagaaaagtggtgcaataacattgaatcaatcattcgcattctcacggcatcgcagactgcgctcaacgccgggtatccgggatttggtaagagaaaatcggctttccgctaacgatttcatatatcctctatttgtccaagagggtagggggttaaaaacagaagtaccttccatgccgggcgtttatcaactgacattagatttattagaagaggaaattcatgagttaagaatactcggaattaaagcgattcttctcttcggaattccaagctggaaagatgatttggcaacgtctgcttatgcgtcagatggaattgttcaacgagcggttaggcaaatcaaggctttagattctgatttggtcatcattacagacacatgtatatgtcactatcaaacagaaggccattgcggcatacctgtaaacggcaggatcgataatgacatgtctttagatatacatgtaaaagttgccgtatctcaggctgaggcaggggccgatattctggcgccctcaagcatgatggatggatttgtgacgtatatccggcatgcgctggatgaatcgggttataaagacataccgatcatgtcgtacggtattaaatatgcttcaagctattatgtgccatatcgcgatgccgcggataattcgcccgctttcggtgaccgccggacctatcagatggagccggcaaaccgtttggaggcttttcgtgaggctcagtccgatattgaagagggagcggatattatgatcattaaacctggtctgccttatttagacatcatcagggatatgcgaaattctctccagattccgctggtttcgtatcaagtaagcggagaatatgcccaaataaaagccgcatcgcaaaacggctggattgacgaaaaaaatacagtgttggaaagcatgcttgcgatgaagagggccggtgcggatcttattgttacatattttgcaaaagatatagcaaaatttcttcgggaggaatcatgaaacgggcagcgatcatattcattcgattctaccaaaaggcgatatcccctcttttcccgccgacttgcagattttatccaacatgctccaactatgggcttgaagcgattcaaaggttcgggtttatcaaaggcagttatctgcttattaaacgattactgaaatgccaccctcttcatccgggaggctttgatcctgttccaagcaaaacagatcaaaaaagggaaggggattcaaattaatattgtaggatgatctattgatcgtttttccttgcagggcaggcaggggaagttgaccgctttcctgaagaactcctgcacattcagagcagtaaatgaaaaggctgcataaagatgaccgggtgtatgtttcagcaatacacctggtcatctaattgtgtatttttatacgagaaatttcgttatttatcaagacctaaatcaaaaaaagtcataaaaaataaggagttatatatattttacatgactaatatgtataactcctttagttcttgttcaataatcgcgcccgattgtggaagatcgttattcaactaaagcccccgatagttgaataagaaaagcaaaagaacttgctatttcacaaatatatccaccaaattttcatattagtttgtttttcatacatactgataaaaaataaaaccttgttaaaactttacaagacaaactgaattgactatagtctaattagaccaaaatattgatgtaaagaagtgaaaattagatgataaagtcttttttaatgttggggcagtcgaatatggcaggccgtggatttttgaatgaagtagaccctatctataatgaaaaaataaaaatgctgcgcaatgggcagtggcagatgatgacagagccgattaattacgaccgtccggtttccggcgttggcctggcggcatcttttgcagatgcatggtcgaaagctcatcccgatgaagaaattggcttgatcccttgtgcggaaggtggcagttcattgaatgactggcatccggaaggcatcctttttcagcatgctttgtccgaagcccgcttcgccctccgctccagtcaaatttgtggaatcctttggcaccagggtgagagtgacagttatcgttcgctacatgaaacttattacgagaaattaacccttatcatcgagacgctaagaaacgagttgaaacttgatgaggtaccgttgattattggagggcttggtgactttcttgggaagaccggttttggacagcacgcgaccgaatttcgacaggttaatgaacaattgctgcgttttgctaatgaacaacagaattgttattttgttgctgcggcaggtttgactgcgaatcctgatggcattcatttagatgcagcttcacaacgcaaattcggttaccgctatttcgaggctttttcgaaaaagtaccatatcctgaaacccatttcgggagaggagcaatcactgaaagtgaatggtgactattctaaaacagaacagatttaccttcacagcatggatttggcttcgggtaaaatcacgtacgcggaattcgaggcgcggatggcgatggtgatgaaaccataattcccttacttatccttggcttgctaatccaaaaccccggagctcacggctatgaacttctggcctgtttgttggacaatcaaataatatacaattatttaaccgatttataaatgaaaaactccccaatctaaattctttaatagatttggaaatgataggactttttctcgcatcctctccaacgatcaagtttggcaatgtgagggccgattaaaccaataaagccaattgctccaacaatcgaaacggcccctgcggttaaaagggcagagatgaaaaataaaagagcatttgttttctttaaagaaaggcccaggagcacagctgattctgttccagcctccaggcatttgcgattcccgctgtcaacaatcccgcaatgagcgcaggaactgcaattggccataaaaggttcaagcgaatccaaatccttccattcagtgatccgatcgtccacaataaaatgcttccaagcgcttcttgatgtctaagtaaaataaatgaagtcacagcttgcaataccgctgaaattaaccatgccgtttaacaaaaagacagacgacatcttcttggtataagcgcttaatacataaacgaaaacagccgccaaaattctgccgatgcattaaaaaaatggaagaaaaaatgaaagctgcaaatgagcaggtccaaatgtaatccgctcgaagacggacttccgtctcttaaggtatcgtgaacaccgccaatcccaatcaccaaatccggttcatattgataaatgttctgaagattaggtttataaaacgtgccgccgattaatgggatctgatggtctttcccataaaaattcgtcttcatagcgtaccattcaacaaagataaaaaagtcatttaaaaggaagcaaaaaaattaggaaaaaaagcttcccatggatgtatcaggcttgcgattccagatgcaaaatggatgtatgaaaacatacctgaaaaaacaaaagctgtgatcagctgatttggctcgttttattgatcaagttaggagactctttttttaagagtcttctttttgcaaatatcggtggcattcgaaattgacgcatgaagagaaaaggcggtcaaaaacaccccctttctgcttgttaaaatgtttcatataataaacataaatgatatgcagaggaagtttagttttgatcagacttaggaaacaaaacaaccgctaaaaaagatgaggatcatacatggcaactgatcttttcatgctgatgtagccgttgatggagagcattaaaacaaataaagtggatttgtaatgattagatgaagtgaaagagcatgataatggagttaaagtaatgaatttaatttaagaaggaagtgaaagcatggatcttgaaacggttatgaaagaactggaagcgctgggtacggaaaacatgaaaaaaagatacataacgaatggtgcacacgaaccgctgtttggcgtggctacaggcaaaatgaagccgctcgcaaagaaaatcaagaaaaatcagcccttggcggagcagctttacgctaccgggaactacgatgccatgtattttgccggcattattgctgacccaatgacaatgactgaagcggattttgagcggtggatcgatgcggcgtatttctatatgctatctgattatgttgttgccgtaactttggcagaaaccgattttgcgcaggctgttgctgataaatggatctcaagcggtgaagagcttaaaatgtcggcaggctggagctgttactgctggcttttaggtaatcgaccggacgatgaatttaatgtagctaaaattgccagtatgcttgatcaggtggaacgtacgattcacgattctccagatcgaacaaaatcggctatgaatcattttatctacacagtcgggatttcatatttgccgcttcatgaaaaggcggttgaaaccgcaaaagcagtaggcccggtcgaactcaggcggggcaagaaaaaaagcagtatcctgaatgcttccaaaaatattcaaaaagatattgatagaggccatctcggtttcaaacggaaatatgtaaggtgttagcatagttttcagtaaaccatctaaaaataaataggaagtggaatatggaaaataacgtttttgaacagatcgcaaagcgatatgatacagaagaaagaattgaattagctaaagtgatcgtgaatgaagtaagaccggaattgcgaaacagtcaatcaaaatctttaattgactatgggagcggtacgggtctcattagtttagaattatcagatttagtacattctattttgctggtcgattcatccaaacaaatgctggaggtggcgaaagctaaaatttctcgcaaaggaatcgccaacgcaaagacgctttattcagatttcacccaagaaactcctgaactgaaggcagacatcgttttaatgtcactagtccttcttcatattccggatacaaataaaattttacaagaactgttcggcattttaaatgatggcggcaagctcataattattgattttgacaaaaatgacaaaatacaacatccgaaagttcacaacggtttttcgcacgaagaattgaaaaaaagattatccgatattggatttaaatcaactgaaatgaagacattttttcacggccggcgtatttttatgaatcaagatgcttcaatgtttatatccagcagcataaagtgatttcttgtttttttaaaatgaaataggaaaagccggaaaatgacccggcttttttcatcacttctttttctctggacggtaaaactcatcatgcattttcgatcaacgcccgtttctcgggttcgcgaaatctaagctccttcgcggtttcgcactgcgctttttttcttaattcagtccgaaacggccgacggtgacttcttttgtcgatgtttttttgtttttaaagatggcgcttattatacttttgcagaactaaaaatttgatttatcctcagcagttcagtattatacgcataggggtatatgtataggcgggcgatggtccattaggataaagcttgtctggacaaaaagccatcactggtcttaacgaatgtgacagaaatgcaggacagttcatatctgcgtagtaacggtttgcggaaaagttgaaggatatgtcatcatcataaggaaataggaggttatgtgatggaatacgatgatcaattaaaaaataggatcaaacgagttgaaggtcaagttcgagggatattaaagatgatggatgaaggaaaagagtgtaaagaactcgtaagccaaatgtcagctgttcgttctgcattagatcgggccatcggtgttgttgtaagcagtaacttggagaaatgcgtccgccttcaaattgaaagaggagaagataccgaagacctcatccaagaagccgttaatttattggttaaaagcagataatgtttagatggctgttgtttatgatacagcctctatatacccctggttaaaagaaattttgctgtttttataccctttagggtataaaaagctgacttatattttttttagtttttatatacctgtacgggtataagtatacaaaagtgggagagttgttatatgtcagaccaaaaagaaaaaacgaccattgttttatttagcggtgacctagataaggcgattgccgcttttattattgcaaatggcgccgctgcttatgatcatgaggtaacagtttttcatactttttgggggcttaacgctttaagaaaagatgaaccggtgccagtaaagaaaggaccgcttgaaaaagcgttcggctttatgatgccccgtggttcaaagaaactcggattatccaaaatgaattttgccggtatcgggcctaaaatgatcaaacatgtcatgaaaaagcacggcgtactgtctctgcctcaactgattgaaatggcgcaagaacaaggagttaagcttgttgcctgtacaatgacaatggacttgttaggcttgcaaaaagaagaactcatcgacggccttgattatgcaggtgttgccgcttatctaggcgatgccaacgaagcaaaggtgaatttatttatataatctccaaattgaacggttgcttcttcgggaatgcaaaacaggaaatcctgaagcagccaaatggaacagtgatataaaacagaaaatgaatatggagggatgattgatgaacatcaaaactgatcgcgtattagatgcaaaagggcttgcttgtccaatgcccgtcgtaaaaacgaaaaaagccatgaatgagttaaaaccggggcaggtaattgaagtgcatgctactgataaagggtctcttgctgatatacgggcatgggcaaagggaagcggtcaccagtatctcggtacaatagaagacggagatatattaaagcattatcttcgaaaagcgggtcactctgaaataaagaaagtaaaaacgtttccttatacgattcaaaatgaagagcttcaaaaaaaggtagaggcgggcgagcggctaacagtagttgatgttcgggaacctgcagaataccgtttcggccatattcccggagcgatttcaattccattaggtgaacttgaaaaaagagcgcacgaactgaatagagacgggaaaatttatgttgtttgccgtacgggtaatagaagcgatctggcagctaaacagcttgcggataatggctttaaagatgttgaaaatgttgtccaaggtatggcggagtggtcaggccctgttgaaaaaaatcaataaaagaaaaattggaggaatgatttgaatggccgtaaaagttgcaatcattgcaacaagttctgatgccatttgggccctaacattttaaggaggtttaaatgtgaattttacattcgtttcaccaaaagaagtagctgaaaagctattaagaaaagaatcattttttattttagacgtacgaaataaagaggcccttagtgattggaaaatcgagggaagccgggttgaacatttaaatgttccgtattttgatttaattgatggtatagaaaaaattgatggccaagttcctaaagatcaagatgttctagtcgtttgcgccaaacaagggtcttcagagatggttgcacagcatttagtggatgccggttttgaaagagtgctggtacttaaaggcggtatgaaggcgtggagcaaatttttacatccagtcaaaatcggagacttgaaagaaggagggacgatctatcaattcgtaagaatggggaaaggctgtttatcctattttatcgaaaccgacggagaagcaattgtagttgaccctgctcgttctgttgatgcatatatagattttgcgaaagagagaaacgttacgattaaacatgtggtcgatacacacttacatgcggatcatatttcgggcggacgtttactgcgtaagcgtacaggagctgcatactacctgccgccaaaagatgcggaggaagtgctattttcatatgaaccgctagttgaagatgaaaatatttctgtaggaagcgcaggtatgaaagcagaacctatttactcacctggacatacgattggtagcacctctttaatgattgataatcgctatttgttaacaggagatattttatttgttgaatcgattggccggccggacttagctggaaaagccggggattgggcagaggatttgcgtaacacattgtatgtaaaatacaaacaaatatcaggtgacttgattgttcttccagctcacttttcgacagtcagtgaattaggcgatcaggggcaagtccaagctaagctgagtgatttatataaaaagaatgccggtttaaatctggatgaaaatgaattcaaaggggctgtatcagaaaatctgccgccacagccaaatgcatatcaggaaatccgtcaaaccaacatgggcaaaataatgcctgatgctgacaggcaaagcgagatggaaatgggaccgaaccgttgtgcggttcatggatgaatatagatttgaagatagagataaaaaatgaaatcagataaagtaatagatgctaaaggatttgcgtgcccgatgccaattgtgaaaacaaaaaaagcgatggatgaattgcaatccggagaagtgttagaagtacatgccactgataaaggggcaaaaagcgatctaacagcatgggcgaagtcaggcggtcatgagttgcttaaagatacagaggaagatggtatattaaagttttggcttaaaaaaggttaaatgtgataaaagggggctattccccctttttattgatggaaaggaggaaaggtagtggacatatcttttattcttcttatatttttcatcggattcattggctcttttatgtccggaatgcttggtgtcgggggagcaattattaattacccgttgctattatatatacctgctttattagggtttacaggctttaacgcacaccaggtttcaggtatagtggcagtccaggtttttattgctgcattttccggtgtgtgggcttaccggaaagacggttacttaaataaagaactgatcttcatcatggggttaagtattttgcttggaagtctaatcggcggctatgggtcacattttttctccgaagatgccataaacatggtttacggattattggcgatcattgcagccatcatcatgttgattccaaagacaggaacagaaggtaatcaaagtgatcacattcgctttccaaagatattaacctcaatcatgacttttgtggtcggtttggcttcaggtatagtcggtgcgggcggagcttttctgcttgttccgctcatgttagtcattataaaaatacctgcacgaatcacaatcgcaacatcactcgcagttacatttatttcatcgattggaacaacagctacaaagctcgtcattggacaggtgcctattatgccggctttggttgtaatggctgccagtctgattgcatccccgctaggtgttttcattggcaagaaagtgaatgctaaagttcttcaaggtattttgatattcgttatttttcttacaacagtgaaaatttgggttgatatcttactgtattgaccgtcttgaaggaggaattggatgaaagaagctgcagaactaacttcaatggtgtcaattgagaaatttataactgatcatcaattaagttttatatatatatcaagacctcaatgcacagtctgtcacgctgttctgcctcagcttagagcactgttggcccgctttccaaagatcaaattaggacatataaatgctgacatagtggaagaggttgccggcaggttttcagtcttcacagttcctgtgcttcttttgtttattgagggaaccgaatgtctacgagaagcgcgttttattcattttgaacagcttgaacagaagttaaaaagagtctatcagttgtacgaggaatagatagctaagggagggtccatgatgtgtcaaaacccgctcggtatacagaagaaggaatgtcaaatgaaagcggctatttaaggcagatcttcgaccatttgcaggatgggatcatcatgatggatcaggaacgcacaattctggtgatgaatccgtccgcagagaagatgacgggatggaaactaggggataaggttccgtactgttcctactgccaaacgagaaaactggaagcgggagaagagcgttgttatttgctggccaagcgggaaattccttattttctctcctcgatgcccacctatgaagggcgattcgtcgacatggagatgagtacggctgtcatttccgaaaacggcgatcaaatggaagttcttttggtcctgaaagatttaacaatgaagaaaaaggaggaagaagcgaagatctccaagctggttttgcaaaaaacgttagaggcccaggaaaacgaacacaagcggcttgcccaggaactgcacgatggtgtagggcaatcgctttattcggtttcagtaggcattcaagcgattcaatcgcgcatggagcaggaagaaacatttaaagattacatgcaggacatcatcgatgaactggaaaaagcaatccaagacgtcaagctctactctctccagctgcgcccgcacagtctcgatcaattggggctgatccctgctgtcaagcatcttgtttccagcttaaacaagacgcatcaggatgtttctattacgtttgcctcaagcgatatcagcaatcgcttgctgccgatttttgaaatcaatttgtaccgcatcattcaggaggcgcttcataatgccctgaaatattcgcaggcgacacttattgaagtcatactttacaaagaagacggcgagctcgttttgatcattcaggacgatggcattggttttgaacgcgggctgacagaggaaggcctggggttcaaacatatgaaagagagagtcgatcagatggatggaagtcttcgaattcactctgcacttcagagtggcacgacgattaaagtgaaagtacaggacaaggaggggaaggagagtgatcagggtattgctggtcgatgaccatatgatgattcgcaagggcatccgtgtccttttggaaggcttttctggaattgaaattgcgggagaaagcaataatggcaacgaagccgttcttagcgccggacagttaaagccggatgtcgtgctgatggatttgtcgatgccgaacgggttggacggattcacagcgagcagtgagatccgaaagttgaatccttctgttaaaatcgtgattttgacaatgcatgatgaggaaatttttgtccaaaaagcaatagaggcgggggcgcatggctacgtcttgaaaaacagccattatcggttgctttatcaggcgattgtcgaagtgtacaggggcaatctcttttacaaaacatctgtatcgcaagacatcattgatcaatggctcaattcagagcccaaaaagccgacctctgtattaactgtccgcgaaaaggagattctcagattcattgtgctgggttatgccaataaggagattgccgataaactctcaatcagcgtcaaaaccgtcgaaaaccacaaaacgaatatgatgcagaagttagatctggactcgaaacacgaattgattcaatatgcgatcaaaaataaatatctcgatctgtcgttgtaacatacggccccttaacccctgtcagcttgtgaagacggagctcacataaaagtaggggagttcccctatacagaaaaaggaagattgatgttaacttaaaaaaagagagacgcatcattaagaaaaacagcagctttctataaacataagggggttgaccatggcaagacatgctcgttattccattgtcattgtaggagccgggactgctggcatctctgtcgccgcccgtctcgtaaggatttctaaaaaactcaaaggacaaattgccatcattgacccgcaaacaaagcactactaccagcctttgtggacattagttggaggcggcgcagcgaagaaggaagagtccgagcgagatctggcttctttaattcccgctggtgtcgacttgatcggcgatgctgtaacggagtttcggccgaatcagaacacacttcttacaaaacaaggaacgatcgtttcctatgattatcttgttgcaacagccggtttgcaaatcgattgggacggggtcaaaggcttgaaagatgcggtcggaaaaaacggggtttgcagcaactattcatatcatacggtagacagcacttgggaaaacatccgcaattttaaaggcggaaccgccattttcactcatcctgattctcctgtaaaatgcgtgggagctccacagaaaattatgtacttagcagacgactatttccgcaagtcaaatgtccgccatcagtcggagattatttttgcatcggcgaaatcgatcatttttgatgtcaccaaatacgcaaatgcgctcgaaaaagtcgtcctgcgcaaggatatccaaacgatgtacaagagaaacttaatcgaaattcggcctgattcaaaagaagccttgttcgaacatttggagacgggggagcaggaagtattcacatatgatcttcttcatgtgactccaccgatgaaagcaccttcatgtataaaagaaagcgcattggcggatgccggcggctgggtcgatgttgatccgtacactctgcagcacaaaaagtttgccaatgttttcggaattggagactgttccaacctgccgacctccaaaacaggggcggcgattcgcaaacaggctccggttgtcgcgcgaaatctgatgtccttgataaaaggctcttcattagatgcaaagtacgatggatatacctcgtgccccttggttacagggtacaacaaactcgtgctggccgagtttgactatcacaaggtgccgcaagaaacgtttccatttgatcagtccaaggaacgattcagcatgtacctgttaaaaagaagattgcttcccatcatgtattggaatggcatgttaaaaggactgatgtaagacaggacaaagcatgatgcgaactcaaaaaaggatatattacgataaatgtttcaagagggggaatacaacatgttattgcgctatttttacgataaaaaactggcccatgcatcctatctggttggctgccaaaaaacaggggaagccattgtgattgaccccggccgcaatctaaaaccatatttgcaagcagccaaggaagaagggctaaacatcacagcggccgcagaaacccatattcacgccgactttgtttccggtgcccgcgaactcggcgctacacatcaagcgaagctgtatctttccgatgaaggagacgcaaattggaaataccaatatgtcgatgaatcgaaacatcaacttgtgaaagacggcgatcgcttttccattggtaacctggtgtttgaggttatgcatactcccggccataccccggaaagcatttctttcctgttgacggacggcggaggaaatgcggatcgtccaatcggcatctttactggagatttcgtctttgcaggcgacatcggcagacccgatttgcttgaaaaggcggcggggattaagggaacgtcagagtcgggggcaagagcgatgttcaagtccctcatgaagtttaaacagctcccggattacttgcaggtttggccggctcacggcgcagggagcgcttgcggcaaggcattgggagccattccaactacgactgtcggctacgaaaagatgtttaactgggcaatggcttacaccgatgaagaggaattcgtaaatgccttgcttgatggacaaccagaaccgccgaagtattttgctgagatgaaacgagtgaataaagaaggccctgcattgctcaaagatctttctgccgttttagagattatgtcgattgaacaagtgaaagatttgcaggggaaagagcaaattgtggatacccgctcctcccgggaatttgctgaagggcacctcaaaggcacgatcaacattccattcaacaaggggtttacaaactgggcaggctggctcatcgactacaatcgtcctgtgtacttaatcgcgaatccggcagaagtgaacgaactcctggaagcgctgcgctccgtaggcattgacaacgcggcagggtttatcgatcgtgacaaaatcttggcagacggtgctttttcacttgaatcgtacgctgagatcacaccacgtgagatcgcaaaattagtggaagacggcttcgtgcaagtgcttgatgttcgcaatctgactgaatggcaggaaggtcacattccgaatgcgcaacacatcatgctgggaacgctcccagaacggctcgatgaaattagaaaagactgtccgattcttgtgcaatgccattccggagcccgatctgcaataggagccagcatcctgcaagctaacggtagtttcaaacaagtattgagtttaagcggcggcattgtccaatggcagaaagacgggcttgccatttcaaccccttgcagcgaattaaaatgaaagaaaatttctctgctcaagcgcatggaataaaaagtcaagaggccgctatgtcttactcccggcctcttgactgatagtgtttccgcttttccttctccgtctgatcacacttctgaaacatatccgcagcgcccgcttcttcgcgttttctctttcttcggatcaaggccgaaacggctgtcgatgacttttttccgtccgtccaagatgttgatgtaatttttcactttttgaaggtaattgtggagaggaaggataattcttagaactaagaagaaaggatgggattcatgaaggaatatttttcaatcggggaaacagcccgtctaaataacatttccattcaaacattgcgctattatgataagatcggaattttcaagcctcaatgtacagaccgggataacggctatcgatattaccatgttaaacagttcttttatttggatattataaaatatctcaaatccattaaaacgcctttggaagaaattaagcgcattatctcacatacatctgcccctgaactgatgcaaacctttctggaggagcaagaaaacgttattgagcgtgaaatggaaagactcgaacgtgccaggcaattgcttcaaagaagaaaggaccagcttcatgaacaattggagatactcgctaaaaaagaagaaggtctggtgtatgttcggcatatagaaggccaaaccattttaaaagcagcgacacctcaagtgaatcctcatgaccaatcagatttgtattaccgaaaactggctgaggtcctggaagaaagaggagatatggtcgataactattatggactgatttatgatttaaagccttataaaaattcaggtgacatttattgcaacagtgtttatacgacgatttatgatggagcaaagatagatacagaagaacaaaatattgggatggatacgatcccatccggtgaatatgtgtgtatttcatttgattgctcttcaacaaattatttttcatactatcaaaaactgtaccattttattgaatctcatggcattcaaacggatggaaaagtatatcaagtttcttttccaaacagctataactcattaaaagaagaagacttcctcacagaattcagagtgctgaaaaaataacgaactccttgaccctatagttgctatagggtttatcatttatgcatcgttcttatgaatatttgaaaggaagggtatataagtggcagaaaataagacgcttcgtttactcatgccggcaatagcaagtcggaaacagcctgctgtgagcccatttattaaactggcttgcagctaaaacgaacggtccttttgacgagaacatgtcgatccagatgcgagcctctcaaattttaataaaaaatgaatctaaaaggagcggtggagatgagagcaccgattgatgaacccatttggtacgcctatcccggcatggtagctgtcgttacggctcaatatgaaggtgaaaaaaacgccatggcctccgggtggcatacgtatatcggatcttctcccggaatgtatgggatatcgttaaataatgagacatttacttacaaattgattgagaaaagtggcgttttcggtgtgaattttcttccggggagatgctcggaattaattcaagcattaggcacccacagcggcagagatatcaataagtttgaagcatttcatattcaatacgaagaagggctaaaagccgaggtaccgattttaactgatgcatattttgcttatgagtgtaaagtacacagtatttccactttgggcgatcaagagtggattgcgggagaagttttacagagatatcaagataaagagcttttcttaaaaaaaggcatgccgaatttagaaaaattggatgttccgcttcatattggagggtccagctatcgcatattaaatagtcaagcagaggaacatcaacacgcatttaattccgaagctgattgacatattcaggtttctccacattcactcgagcaggggaagccaatcaatggatgtatgtccactggattcgcgctggaaatccattgactttatactaagcaagaaagagacccaaagaccgcaacgtttctttaagaaagctttgcggtctttttatattccaaattaggaaaaagctccttcttctcccggtaaaactcgtgaaacaccttcatcagcgcccgcttctctatccgcgacacatagctccgtgaaatcccgagctccttcgcaatttcccgctgcgttttttctttcttcaaatcaaggctaaagcggccggcaataaacttctttttctctgccgtccaggatgtcaatgaattttttgactttttcaagctctgtgcttgaactgaatggtgtcgatgacgtcttcgttttccgatcctgagggcatcaatgaggctgatttcaatgccactcacaggttttaataggttgagggactgaactaaaaagataccgaacaatatctaaatagttcctgtttgatgacaaaataaaaagatacaaactgaaggtaatgaatgatcaattctgtgtataaaaaaatatatttttgtttcatttttgtataaaaaattatataatgaatccatgaatgaaatcacttgagataaatgcgggtaaatgaaagttaggtgttcaggttttgactgaagcaaaacaggttttaaaaagttacataccatttgcaaaaacgataggggaaatgtttggtccaaattgtgaggttgtcattcatgatttgacaacccccgagtcttccgtcattttcacaatcaacaatcatgtaacaggaagagaggttggccaatcctttgaccatttggtgaaaaaagttcttttatccaatgaatttaaagaggattacttagctggatatgaaatccaagcagatgatgggagaacaataaaatcatcgactaccctcattagagatggccagcagcaggtgattggggctttttgcatcaattacgacatgaatgtaatgattcaaatgaaagaaatgttagatgcatttatgcctggtgttgaaaagaaaaatcaaatacaaacttcgaatacggcggagcaggaagcttcgattcagaatgtagaagagatcacgaaccagttaattgaacaaattgtagcgaaccgcaaacactctatgatgaaacgccgggaaaaaatcgagctgatcaggtttatggatgaaaaggggatattcctcatgaaaggtgcggttgataaagtggcagaacaattaggcatttcaaaggtaactgtctacagctatttagatgaagtaaaaaaaagacaatcggagtgaacaaagtggagagtatttttgaggcagggaatttaaaatcgaacggtcattatgccttagctgtgattcatcaaaacacggtctatgtatcagggcaatttgccattgatccaatcacgcaggaaaagaaatttggcaccattgaagaagagactttgcaggtattgttaaatatagagtatatcttaaaaaaagccggcagtcataaaggaaaaattttaaagataaccttatatcttcacgatatcaatttgttagaccgtgttgacaatgtctgtcagggtttttttcacgattatcgcccagcacggtcagttgtttcgacgaccgagctgcattacggttttcaggttgaaattgaagcaatcgccagtctgtaatatatttttttgtctaaaacatataaaaaaatatataaaatataaaaaaatatataataggagggtctaaaaataatggaacagtatcaatgtcattcttgccgtacgaaatacaatgtgtctgaacaggtgtggaaatgccagtgtggcggagtgttagaccttgtaaaagaaaaagtagaatggtccgattcaaaagtgctcaaagatattccttctatgtggagatatattgaagctatgccatttgatcgcgactccgccatatggagcggcatcaccatgggggagggatacacgcctttaatcgtgttagacagcggggagccgaatactcttgtgaaagtggactatatgatgcctactttgtcttttaaagatcgcggtgcggctgtattaatagctaaggcaaaggagctgggagtgaagcatgtgatcgccgacagcagcggaaatgcagggacatctattgcagcttacgccaagcgggctgaaatcgcatgtgacatctttcttcgaaagggtacatcgcctaagaaaatcgcgcaggcgaaagcgcatggagccaacgttcgcgaaattgaaggcacaagagaagatgtggctgaagcagcgcaaaaggctgtggatatagagaaaaaattctatgccagtcacgtttttaatccatatttctatgaaggaacaaaaacgtatgcctttgagatttgggaacaaatgaatggagcgccggatacgcttattattccagttggcaatggtacgttattgcttggggtttactatggatttaaagagttattagagaacaaatgtatagacaaaatgccaaggctggttgcgatacaggcagagaattgtgcgccgttggcaaaggcatttatcaacaatcaaaaagctgctgaacccgtcaaaagcagcggaacacttgcagagggcatcgcgattgccaaaccggcaagatctgctcaaatattagaaaccatccgtgccacaaacggtcaaatcattacaaccaatgaggaagagattctaaaagctcgtacagcattagcaagtaaaggcttttatgttgagccaacaacagcggctaactatgcaggatatttaaaatacagtcattcttctgatgaaaaaatcgtgattccattatgcggggctgggattaaatctaattaggaactaagagagaaacctttaatatgaaaatgggggagttagcatggaaaacaagaaaatcattttgctgagtaccggcggtacaattgcaagtaagcctgatcctgaaacaggtctattagaagcaggtgctatgacaggtgaagagctttctgaaatgtgtcgactgccttctcatatagagattgaaatcaagtcagtcttttaaatgtcaagcagtcatatgacttttcatcaccttgacattctcaagcaaaatatagagagtttcttccggaatgaggatgttgccggaattgtgatatcgcatggaacagatacccttgaagagacttcgtatttccttgatctggttatttctgatgaaaggccggtcgtgttaacggggtcgcaaagaggaccgacacttgaaggtacagatgcgtttgtgaacctaagacaagctttcttattagcggcacatcctgatgcgcgaggcttaggggtaacagtgttgtttaatgagagggtttttgctgctcgatatgtgaaaaaacagcatgcgtcaaatgttgatggttttttctcaccgggattcggttatttgggaactgccgatcaagatgagatcgcaattcatcaaagattaatcaagcgtgagacgtatcagctgattcaaccattaccaaatgtggaacttattaagtgttcacttggatcagacggaaagtttatagattatgcagttaagtgcggaagtgcaggaatcattattgaggcgccgggaagagggcatacggctccagcaatattagaaagtgcaaagaaagccgcagagaaagggattcctgtcgttctgacaacaagtgctcacgaaggtgaagtcaagggagtatatggattcaaaggaagtgcttcaacatatgcagatgccggaatcatacttggcggcagctatgacagtaagaaagcaaggatcaaactcgctgttttgctggctgctggacagaagattgatgaggctagctttaaatattaagaataatagggggagattatattgaagcctgtacacacgaagtattcaacacgggatgggggccattacgtgccagctatggaacacaatgatgttctctatatttcagggcagttgtcgatgaatccagaaacgggaaaaattccagctgggggcataaaagaagaagcaaaacaggcattggcaaatatggagcttgtcctcaaggaacggggattagccaaggaagatgtgatattatgcagactttataccccagatgtaaagtattggccggatatcaatgaggtctatgctcatttcttcggcaatcataaaccggcaagagtagttgttccatcaaatcatttatatgccgggtgtcttgttgaagttgaagccattgcagcgataaaggaggaggcacaatgaatgatttacaattagatacaccagctcttttaatcgataaagacgtgatgttaagcaatatgaaggatatgcaaaattacgctaacgaacagaaggtaagcttacgccctcatacaaaaacacataaaatgcctaaattagctaaactgcaagaagagatgggagctgtaggaatcgctgtagcgaaagtaggagaagctgaagtgatggcgagaaatggcttaaaagatatctttatcgcaaatgaaattgttgggaaatcaaagcttgaacgtattagaaaactatctgaaacgattgatatctcttttggaatcgatagtgcgtatcaagtacgtgaaattgaagaagtatttgaaggagcttcaaagaaagcccaagtgttggtggaaattgaagtaggagaacaacgctccggaattattgaagaagatgattttcgtactttattagaattaatcaaaacgtgtcaaaatgtcgagctaaaaggaatcttctcacatgacggacattcttataaagcgaaaagtgtagcccattgtaaagaactctataaagaaagtgtagaacgaacattacatttcgcccgaattgcggaagaaatggatctaaagccgaaagtggttagtattggctctactcctcccttcatgtttaagtttgatattccagaaggggtgacagaaatcagacctggcacttacatttttatggacgcctcacaagcaaatgtaattggtacgtatgatcgctgtgctgcttctgtactcacaaccgtgattagtaaaccaacaaaagaacgagtcattacagacgtaggggccaagggaattaccgcccaaacacgaagcgaagggcttactgcaaccaaagggcttggccgtatcaaagaatacgaggacgtttatattcatggcgtattcgacgaacatgctattatttatcatgaagaattcaacaaaaaagtaagcattggagataaggtgcgaattattccaaatcatatctgcccagtatgcaacttgcacgataaagcctatttagtcgataatggagaggttgtagatgaattaaatattgaagctagaggaagacttcaataatttaaaaaataaggggagatggcatgagtccgaatcatcacaaactattttacaaagatccctatctaaaaacgtttgaaacgaaaatcttgaaacaacaacaggacaaaaaaggtgatgtttatattatcctagaggaaacagccttttatccaacaggcgggggccagcctcatgatacaggaacattgaacggagtcaaagttttaaacgttgatgagatagatggagaaattcgtcattatgtagaaaggcctttgccgcatttaaatgatcaggttgttggggttattgattgggagcggcgttttgatcacatgcaacagcacaccgggcagcatattttgtcggcggcattcgcgcagctgtatgatcttcatacagttggattccatcttggaaatgatacggttaccattgaccttgatgtatcagaattaacagaggaaatggcaggcaaagcagagaagcttgcaaacgagatcataacggaaaataggtccatagtcgcaaagtgggtagaatatgatgacttagtaaattatccgattcgtaaactcccatctgtaaaagaaaatattcgtcttgtcatgattgatgaatttgattacaacggatgcggcggaacacacccgagcgctacaggagaagtcggagcaataaaagtattgaattgggaaagacagaggaaaaaaattcgtctgtattttgtatgcggtaatcgggtcataacccaattcgatcaaaaacaaaaagcaatcgttgaattgactggattacttaatcgtcctgaaggggaattaagcgaagctgtcaaacggttgcttgaaaatgtaaagaagctagacaaagcgcttctagaatcttatgaaaaaaaccttcagtatgaagccaatgaattattagcaaaaagcgcaattcaaaatgatactgtaatggtgatagaaacgttttcagatcgatcgattcaagaacttcaaaagctagcaaaaatgattgctgatcgagaaaaacgggcccttatttttttcttgtcagagaacgatcatcgcttccaattggtttgcgggcgaggtgaagcaaataaaatgaacatgagagacctaatgcaagaagctctttcccttattgatggaaaaggtgggggaaataaaatgttcgctcaaggtggagggactgcttcattcacaaaagagaaatttatgaaaaatgttatgaacattatagcaacacaaataaactcagaagaaaattaaaagtaacttcaacaggcctctgtaattggataacaagctttattaagggcctggcagaaagaaatggaagccggtgttttaggccggcttccatgacatcatttccccttccccttctccgcctggtaaaactcatgaaacatcttgaacaatgcgcgcttttcaatccgggacacatcgcagcgcgaaatcccgagctccttcgcgatctcgcgctgcgtttttttcttcaaatcaaggctgaggcgccggcgatgacttctttttctctgccgtcgaggatgtcgttgtattttttgactttttcaggcctgtgcctgagctggatggtgtcgatgacgtcttcgttttctgatcccgaggacatcgatgagactggtttcgtggcggcccataggttactgtttggaattcaggtgaaaagttcagataaaaagagttttacaatagcatgttacataccaaaagcgatttattgactttagagaattggaattgacaaaagtattgcgtaaaaaactcctttttataaaataaaaggtaatgatttgtatattcaagtgggagagtagcactttttttgcaggtgcttgttttatgactccgtcaacgggcatgaacttattaaacggtgtaatattagaatcaaaaaaagaatttgaatgaggcttgtcagcatacaaagaagtacaaggggactataacaaataacgtttcggcaggcactttggttggagcggcaatttctttgacaggtatagacaagggttcctgcgagcagagtaaaacaaacagttttgaccataacttcattagctgttcgaatgaagagttattgcaagaactgacagagataactcctgttgaggaatcaatggaaattagcattttaattcaagaccccgaaaccaatgttgcttattatatcaattcagggaagctaataaaatataaatgtaatctcccagaattttgggggagatatacctcaggaagctctagttcctagaagtaatttgattgaagaattgccaggtgtaaggcgaggccttcttcaaaacaatacccctagaccttcgatgtaatccaataaaagataaaagatatattcagattttaaccatttaagagaagccgccgatatttgcgatatcctctttaagaaaaatattaattataggagggaaaatgattttaataagaaaagccaaagtgtcagacgctaattcaattgccaaagttcatgtggaaagttggaaaaccacatatcaaggagtattgcctgatgacacgttatctaagctttctgtcgaaaatcaggcaaagctttggagaacttcattaagtgatcctaaaaatcaagatattgtctatgttgcagaagaaaccgacggtaaaattataggctttgcttccggaggtccaaaccgcgatcatcttagcaaatataagggtgaagtttccgcgatttatctgttgttacagtatcagaaaaaaggaatcggatctcgactaatgaaggcgattgtagaggagcttgtaaagaaaaacataaaatcattattggtatgggttttagccggtaatccatcgataaatttttatgaaaagctaggtggaaggcagagcacaacaaaacaaatacaattcggtgaagattatttcaaagctattgctatcggctggacggatataaatggttttttgttataaaatgatctacgtgttattatatgctcccctaaaggtaggcagatgaaataaaaaaatctgtttggttgctttgggaatcgggatgctcgttaccaggccaatgatcggaaaaatgattgataagattggtgcgaaatccgtggttatgatcagtcttgtttttccgcttatcttaatcaccgataaaacaagtttgatctggatttccatcgtattgttcatccgctgcaccagtatcggggggaatcttccgttggcgagtgacgcttatacagggcttgacagaaaacaacttccagaagcaggtgtcggtattaataatattgaaaaccctggttcaagcttcggttcagctgtgatcgcaaccgttggcgcaactgtcatggaaggattgcaaccaacgattgcgaatagcttaaaaggttatcatgccgggttcttagtttctacaattgtccttgccataatcttcatcccacacataaaaaagccaaataaacaaatgctcactggtgaagtttacacgctccaagagcattcaaaattggctgatttattccatacggggaaacttcatcaagcagaagacgcgcccgttacccagccaaattagctcgcataaaaagaggccgggtttatataattccgagcctcttcatcgatctcacttccccttcgccttcttccttttctccttctccgcccggtaaaactcatgaaacatcttcatcagcgcgcgcttctcaatccgcgacacatagctccgcgaaatcccaagctctttcgcaatttcgcgctgcgttttttctttcttcaaatcaaggccgaagcggccgacgatgacttctttttctctgccgtcaaggatgtcgatgtattttttgactttttcaagctccatgttgagctggatggtgtcgatgacgtcttcgttttccgatttgaggacatcaatcaaactgatttcgttgccttctttgtcctggccgatcgggtcatggagtgagacgtcttttttcgtttttttcaatgcgcgcaaatgcatgaggatctcgttttctatacaacgcgccgcataagtggcgagcttagttccttttccggctgaatagctttcgattgctttgatcagcccgatcgttccgatggaaatcaggtcttctgcatcctcgcctgtgttttcgaattttttgacgatgtgggcgaccagccggaggttatgttcgatcagcatgtttctcgcgtgttcatccccctgggccatcagctccaagtactttttttcgtcactgcttgacagcggttgtggaaaggcattgtttttcacatatgatactaaaaaaacgagttccttgatgacataaccgagcgctgcaaaaacacctgtcattaacggcacctccacaaaatgtatgtaggcagaagcctatatgtaaatgtatgtgggaggggggatgtctgtgtctgtacccggcaaaattgccggactgccaaatattccggcgttctgttcggcatgaagccgcttgttttcgccggaaagggcgaccgttgcaatcgcttccattttttagccgtttacaaaagttaacaagagcgggataataaaggtaagggggtgagggtgccggacggttcaccatatcgtaaacgctatcaaccagccggtccggtgcggcagatgaaaaacaaacgtctgttcatactttcgttgattgtgttgagcgtggtcatgatcggagttcaggaaaccttcccaaacctgctgacgacagggttaatgactgtcgttattgcggcggcagtttttaatattttaaaagaatcgctgaataaaaaagatgaaacacacagcaaatgaggcgacagaaagcgacggtgcttctatcgccaataggaaaaccggctcaaagtggtgagccggttttcttatttgttattctttcagcgcttttcccatgccttttaaaaattgcaggccgaagccgacggcccggttgatgtccggatcgttcatggctttcagcagatcgaggactccggtttttttatcgctttttaaaaagtcctctccttgttttgtgccggcgacgatgctttctacaagtttccccatgacttccggttcggctttggagagagcgccgcctgctgcaatggctgtattcatcaggtttttggccggctctttggacagctggccgaggacgattttggcgatgtcttccttcgcgccgatcatgctgtctgcggcatcaaggatcccgaggccgttcagttcgccgagaagcttcatcgtttttgaaacggcggcttcctgttcagccaaaagggctttgagttcttcgagtttttcaagctttatttgctcctcagatttttcttctttgcggatggcggtgatgggagctgccatgtgtgatgacctccttttgatttagtctgttaaatgaacgtaccccggacgcttccatttccgctcgacttcagccccgttttgcggatggcgtttcttattgcgcggatttgttttcggaagcggcggttctgcacatccgccgagcacttccatacgaaccttggtctgcttgtaagccggtgtattggtgcgcgcatctactgcgggaccggtcaagaaattgatcgccgattctttatctgtcgagttcatcggcagataaagttcgttcgctctgacccggtctgtcacaagcgccgttaattttacggcgccaaacggcgagatcagcctgacctgcgatccgtcgcagatgccccgttctttggcgagctcaggcgagacttccacaaagacgtccggcacttttgcctggatgcctgccgatttgtttgtcatattgccttcgtgaaaatgctccagcattcggccgttgttaatgtgaaggtcgtactcctcaggaaattcggcgggctctgcccagtctgcgatggcaaagcgcgctttccggtcaggaaagttaaagccgtcttcatacaaaagaggcgtgctttctccggtcaagctgccccacaggaagctgttccatccttcaattgcgtcataatccgccttggagaacagcggagacaggcttgccatttctgaaaaaatgtcgccagggtggctgtaactccagtcagctccaagccggtttgcgatgtcttgaatgataacccagtccggcttcgcatctccgagcggcgggagcgcctgatacaaccgctggacacgtctttccgtgtttgtaaaagttccatctttttcaagagaagctgacgcaggcagaacgacgtcggcgtattgagctgttttcgaaaggaacacatcctgaaccacaaggaattcaaggcttgataaaatgtcatggacccggtttgcgtttgaatcgactaaagccatatcttctccgacgatatacatggctttcattttgccttcttcaacggcgtgaagcatttcaatgttgtcaagtccgggctcctcgtcgattgttgtgccgtaagcttgttcgaactttttccgcgctttgtcatctgtaatgtgctgatatcccggaagccagccgggaagcgtccccatgtcgcaggcgccctggacattgttgtggccgcggagcgggtaagctcctgcgcccgggcggcggtaattcccggtagctaaaagcaggtttgaaatcgctgcggacgtgtcggaaccgcccgtgttttgggtgacccccattccccaaagaatgcatgtaccgtcggcgtcgcggatcatctcagcgatttgaatcagcgtctgtttatggatgcctgtaattttttctgcatattcaagggtgtatgtctcaagagattgcttatattcctcaaagaaattgacgttttcatcgataaacgcctgatcgtgccagccctggtcgatcatatactttgtcacggccatcagccatacttgatcagttccttgccgcggtctgatgaacagatccgagcgttcggccatttcgtttttgcgaagatcggcgacgatcagcttttgtccgtgaagcttatgggcgcgcttcacgcgggtcgccagtaccgggtggccttcggccgggttggcgccgacgatgatgacgaggcctgctttcgcgatgtcttgaatggtgcctgcatcgccgcccatgccgaccgtgcggaacaatccgtctgttgccggagactggcagtagcgcgagcagttgtcgacattgttagtgccaaatacttgccgcgccagcttttgcattaagtagttttcttcattcgtgatttttgaagacgaaataaatccgactgcgtcttttccgttctgctcccgaatcgagcctaatctgcgggcaacgtagtcaagcgcttcttcccaagtcgattcgacaaattcgttatttttgcggatcagcggtttggttaaacgttcttccgaattgacgaaatcccatccgaatttccctttcacacacgtcgagatggcattgactggagcttctgaaaccggctgaatttttaagatgtcacggccttttgtccatacttcaaatgaacagccgacaccgcagaacgtacagacggtttttgtctttttggtccgctgtgaacgcatcgccgcctcgacttctgaaacggcaaagatgctgctgtatcccggctctacatctttgacaaggtcgatcatcggctccatgacatccggtttgatgcctgtcatgaaaccggcttttccaagcattgatttttccattaacgcattgcacggacagaccgtgacacactgcccgcagctgacgcatgaggattcgttgattgatacgccttcatcccagattacccgcggccgttcaagctcccagtcaatcgagagcgtctcattgacctgcaggttttggcaaacttcaacacattgtccgcaagcaatgcactgattcggatcatagcggtaaaaggggtgtgacatatcgacggcgcaagacgggtcttctttaggcgtgtaagggtatttctggtcttcgattcccatcatttctgccgtattatgtagcttacagttcccgttgttgttgtcgcataccgtacaatagagcaaatgattttcgagcaggcggtccattgcttctttttgtgcagctttgacccgttctgctgacaggctgatcgtcattccgtcttcagcccgcagggagcatgcccgttttaattttccgtctgcttccacaatacacgtatcacacgtttgaataggatccgtctctggtacatggcatatttgcgggtgttcaaacccgtttttgttcaatatgtctaaaacggttgccccggccactgcttcaaattctttgccgtctatccggatactgattggctttccgtccatcttcatttccctccatcatgttcaaaatcaaaaaagccatgtacatatataccgatttccggcgcgggaaatcggtataaacatacatggcggaatagtttactagcaaagcttactaacagaccaatcctatattgtcagattcgatagattcataacacgacggtattacaaatccatcagcccggctttaattataaagtgatattgattataattcaatagaataggaaaattttaaccaagtgaaatgtctaaggggacatcgagacaggtgtaaggttttaaacggaaggggtatgcatgatgtctaaaaaaatccatgaattcaacgatatgattcgcaagcttcgaaaagagctgtttggcaaggggcctgaacggatacgaacggtctttgtcgacaatatggcagtttcgacactgtacggcaatttgacggcgagcgagcagtttatcgcaagcacgccggagggaagggaaatggtgcatgcggcaaggacgaccctgattcagaaacactactccaatcacgtgccggaaggaatggaggagcttatcggagcgaagctagagcacctttttacggacatcaaaattcaggaggatattgcagtgtctgtttttatctttgaccgcaatattgaaggcgtcgccgaatcagccggcggggcttgatgatctgtctcaagttcgagggggagtcatgatgattgaactgaaatcgagtgaaaaacgaaaagcaaaggctttgttagcggaagaaagcccgacattcgcgcatgcgatagccgaaggaatcatcgaaggaaacgtctatgtcgatgatttcctcacaccggccactgctctttttcgaacatcttccgggatttattatgtcgctggaaaccctccggacagcggaagaagcgagtggctccattatttaaatgaacagaggagcggagcgcgctttaccgtgttttcggcttctgaagagtgggacgcttttttaatcggggggcttggcgatcctctgcagcaaatggagcgcgtgtcatttttcctcggaaaagaggagcgtgattgcggcgcagcatttgccggggttgaaagatttactgaagatgaccttcaaaaaagcgcgaattttactgaaaaatacgctgatgagtattggggaggggccagccgttttttgaagaactgtttcgggtttaaagtgttgcatggaggtgtggtcgcaagcgaatgtgtcaccattttttgttcggaacgctttgccgaagttgatatcgcaacacacccggattacagggggcggggatttgcagtcagctgcgccagcgcctttatcgcacatgcaataaagaaccgtttgaaaccgcgttgggattgcgaccggcaaaaccgcgcatcgatccgcctcgctgaaaaattaggttttcgacctgtcaaaacttattctttatttgtcggaaaaccgtgaaccaatacgaatgtttttaaacaggggggacaggttaaaggcatagcaaggactggatgcggcaggatgacaaagagttctcccgttgaaagtgcggcttctctcctatatgatcgtagtattggcttttggaggtggaacgaatgaaaaaaagcttggtgatggttctcgtttttctgcttctgctttcaggctgcggagaggacgatcccagaaaagtcgtagcatttggagacagcaatacacgcggctcaaattggcaatttcgcgattatccaaaagcggaaaagtgggtcaatttacttcagacttcccttcaagggcagtacaaaataaataatgcaggaataggcggagaaacgacggaagacgccaggtttcggttcaggaaggatgtgctggacaagcagccggcatatctttttatcatgttcggaacaaatgatgcagcaattcttacgaaagggctgccgcgcgtatccaaaaaaaggtttaaagaaaacctttattattttgttaaagaaagccgccgccgcgggatagagccggttttaatgacgtgcctgccgatcgtcgaaggaagcggggacaacatcttttattatgcaagataccgggcttcttcgtttgaaaaatacggtggagcgcgtaaatggcacgattcctataatgacgtcacaagggaaacggcgcgggaacttgatgttccgcttatcgacaactggaaaaacatcgtgaaaaaagcgggcggagctacagatgagaagctgatccattcgaggtttatcgacccatcgggaaatcacttaaccccaaaaggcgcgcgaattatttttgaaggaattaacaaaagcaaaatcataaaaacgtcttgatttaagtaaaaggcctagccatttctcctttttcttcataggctgttactataacagaccaaaggaggaatgatgcgatgggatatccttttcccgctggtccgtgttcgtacccggcttatcccggatatgcaggcgccgcatacggatatgcgttcgttgtcgtccttttagtcgtcctgctggtcatcggcgggttctactggcttagtcctcgcggattcttcaaatagcacctcttttatagagaggtgttttttcatgaaaaacagtagtaagcgtattattcaagtgatataatatcaacctaagtgaaaaaaagcggcaagagcgcccgggagtgcttgagctatgaagagacggaaagcagatgaccgagcgaccttcttttgatttcggtttcaatcagctcgatgaattcgcggttcaaattcatctcatttgctttaatgtatgattctattaaaagttcatcagacagctttttcatactcggtacccatttaatggggaagacacctcctcatgaaaattggaataacctgtttggaataagcataaaatgttaagttatatgatctttgtttgaagtacctataatctatcatgaatattgggcgagaacaatcgttctgttatccacaccaaaaagtggataacttgtgggtatcatgtttataatttaataaaaggtcgatgaaatatgagtggatactgtgtgtaattttatccacacctgttgaagaatcctattatatgtcgaaaacttttcggacagccgattttttaagacacttttagatttgattcgacacattgaaaaaagaagcagtaattgaaaggaaagggtgcggctttgtgttaaaaaagttttttttgccggatgaatttgtaaaaaatatttttcatattacccctgaaaaactaaaagagcgcaatgtaaaagggattattacagatttggacaatacgcttgtagaatgggacaggccgagtgctacaccgcgtcttatcgagtggtttgaagagatgaaagagcacgggattaaagtgacaattgtctctaataataatgaaaaacgcgtcaaaatattttctgaaccgcttaatattccgtttatttacaaagcgaaaaaaccgatgggcagagctttcagaaaagccgttaaaaatatgggtcttaaaaaagaagacgtcgttgtcataggagatcagctcatgacagatgtgcttggagggaaccgcaacgggttccataccattcttgtcgtgcctgtggctgcttccgacggcttttttacgcgtttcaaccgccaagtcgaacgcagaattctcagcgctctaaaacggaaaggccatattcagtgggaggaataatgaatggaaaaggtagtttgtatcggatgcggagtcgccattcaaaccgaagataaaaataaactgggctatgcgcctgaagcatcgctgttaaaagaagacgtcatctgccagcgctgcttcagattgaaaaattataacgaaattcaagatgtttcactgacggacgatgactttttgaagattctgcacggcatcggggaaacggattcactcatcgtgaaaatcgtcgacatctttgatttcaacggaagctggatcaacggactgaaccgctttgtcggaggtaatccgatcttattaataggaaacaaagcagatattctccctaaatcagtcaagcgcgagcgccttgtaaactggatgaagcgcgaggcgaaagagcttggcttaaggcctgttgatgtgctgctcgtcagcgccgggcgcgggcaggggatgaaagatgcgatcgacgcgatcgaacattacagacaaggcaaggacgtgtatgtcgtcggatgtacgaacgtcgggaaatcaacgttcatcaaccggattattaaagaggtttccggagaagacgacattatcacgacatcccaatatccggggacgacgcttgatgcgattgaaatccctctggatgatggatctgcgatgtatgatacgccgggaatcatcaaccatcatcaaatggcgcactatgtcgcgaaacgcgatctgaaaatattgacgccgaagaaggagctgaagccgcgcacctttcagctgaacgaggaacagacgctgtttttcggcggattatcgcggtttgattatgcaagcggaggcaggtcttcgtttgtatgctatatgccgaatgaactcaagatccatagaacaaagcttgaaaacgcggatcagctgtatgaaaagcacgctggggaaatgcttgctccccctgcaaaagaagatcttgactcgtttccggcgcttgtcaaacatacgtttacgattaaagagccgaaaacggacgttgtgttctcgggccttggctgggtaacggtccagggggcaaaccaaaaaattgtcgcccacgcccctaaaggcgttcacgtgtttttgcgcagatctctaatataagtgctaaggggagagagttatgaaaccgatatacggactgattggcaatccggtggcccattccatgtctccggacatccataatgcggctttgaaggatctttctttagaagggcattatcacgcttttcgcgtggaaaacgaagatcttgaagatgctgtgaaaggtatgcgggcccttggcattcaagggtttaatgtgaccgtcccccacaaagtatcgatcatgaagcatctcgaccgtattgatgaaagcgccgaagctctcggggcggtaaacactgtcagaagagaaaaagaagggctggtcggatataatacagatggagcagggtttcttaaatcgctgaagccatcccttgatcgtccgctttctgagctctcgatactgttgatcggggcaggcggtgcggcgagggcgatatttaccactctggcagccgagacgcccaagcggcttgatgtggcgaatcgtacgcctgaaaaggcattagcattcactcagcgttttgatggagaggcacgcgccttgtcactgcaggaagcggaagcagacttgtcagcatatgatatcgtgattcaaacgacgtcggtcgggatgcatccgaatgtcgaagctgccccgctttcattggcgaatgcgaaagaaacgtgccttgtatgcgatattatctacaatccgctgaaaacggccctgctgcatgaggctgaagcaaaaggcttgaaaacattggacggagtcggcatgttcatcggccaggcagcccttgcttttgagctgtggacaggacatgagccgaatatggaaaaaatgaaatcaattgtgttgcagcaactaggaggaaaatcatgctaacaggaaaacaaaaacgctatttgcgccgggaagcgcatcatctgtcaccgatttttcaagtcggcaaaggcggagtcaacgaaaatatggtcaaacaaatcagcgaagctcttgaagcaagagaattgatcaaggtgagcgtgctgcaaaactgcgagcagcctaaagaggaagtagccgaagcgctggcgggcggagcgcgcgccgaactggtgcagacgatcggaaacattattgtgctgtataaggagtcaaaagaaaataaaaaaattgagcttccttaatgcttaaaggtggtaatcatgaggaaaatcgggatttttggagggacattcgatcctccgcacaacgggcatttattaatggcaaatgaagtcctgtacaaactggatcttgatgaaatctggtttatgcccaaccaaattccgccgcataaacaaaaaaactcgttttcactaagtatgcacagggttgaaatgctgaagctcgccatttcggggaaagagcaatttaaactggagacgatcgaactcgaaagggaaggcccttcttatacatttgataccgttcgcctgctgaaagaccgataccctgatcatgagttttactttattatcggcgcggatatggtggaatacctgccgaaatggtcaaacattgacaagcttgtcaacatgattcagtttgtcggggtgaagcggcccggctttcaaattgagacgccgtatccgctcgtttttgtcgatgtgcctatttttgaagtgtcatcatctttgctcagggaccgcattaaaaatcggcagccgacagattatttaatacctgacgaagtgaaggtctatgtgaaggagaatcgtttatatgaaacgtgaggaagccttagcctgcgtgaaagaacagctgacagaacagcgctacatccatacggtcggcgtgatggagacggctgtcaaacttgctgaacggtttggcgcagatctgaaaaaagccgaaatcgccgcgatctttcatgactacgccaaatttcgcccaaaagaggagatgaaacaaatcatcctcgacggaggcgggccgcttgaagtgctcaattttcatcatgaactttggcatgcgccggcaggagcagcgcttgtcaaaacagaggtcggaattacggatgaagacatcctgtcagccattcggttccatacatctggaaggcccaatatgactcttcttgaaaaagtggtttatgtagcggattatatcgagccaggccgccgttttccgggggttgaagaggttcggactctcgctgaggaagatttggattcggcgctcatccaggcattgaaaaatacgattacctttttaatttcaaaaaatcaggccgtttatccggaaacggtcgccacatataatgctttagtaaacgatagacattaggaggaattactgaatggatcaagcttcaattttaaaaattgccgcagaggcctgcgatgataaacgggcggaagatattatcgccttgaatatgcaggggatttccctcgtggctgactattttctgatttgccatgggaactctgacaaacaggttcaggccattgcccgggaaattaaggatcaagctgaagaaaatggaattgatgtgaagaaaatggagggctttgacgaagccagatgggttttaatcgatttgggcgacgtcgttgtccacgttttccacaaagaggaacgaggctattacaaccttgaaaagctgtggggagacgcgccgattgaagacctttcgttcggagttaatgaatgatctataaaggattttccagtatttatgacaagctgatgtctcatgctccttacgatcagtgggtcagctggattgaacaaacgatcggcgcgcagcagaaagaacgtatacgggtgcttgatctggcgtgcggaacgggtgaaatatctgtccgcctggctgaaaaaggctatgatgtcacaggaatcgatatcagcgaagacatgcttgcccaggcccagtacaaagcagccgtcaggcagctcgatattcagttctttcagcaggatatgcgcgaacttgccgggcacggacaagagtttgacgcggttgcgatctgctgtgactcgctgaattatctaaagagcgaaaaagacgttttcaatacttttaaaaacgttttttctctattaaaagagggcggtcttcttctgtttgatgttcattccgtttacaaaatggatgtcatttttccgggaagtacgtatgccgatcaggatgaagaagtgagcgtcatatggcaaagctatgcgggggaagagcctcattcagctgttcacgatttgaccttctttgtacaaaatagagacgtatacgaaaggtttgatgaatcgcatgaacagcggactttccagacggaaaagtacatcagtttattgcggcaagccggatttgaggtgcagtgcatcactgctgatttttcaaaattggagcctagcgcagagtcggaacgtcatttttatacagcaaaaaaaacaaaaaccatcgtttaatcgtaacgatggtttttcataatgcatttttcctttgttgagatctcagtacattcgtgaaacaatgaatcaaacggaaaattgcttcttgactagagcgatatcttcttcatacttcaaatgggtgtttcggaacatctggcggaacatatcctgaacaccgctttccagcgccttaattccctcaccggttacaccgcctttaacgcaaaccttttcctgcagggcgggcagtgtgtaaaggcctgtttcgaggagccttcccaaaccgaccagcatctctttcgtcattaaaatagcgtcctcttttgacacggatgtttcttcgacagccgcctgaataaactcctgaaccaaatagctgacaaaggcagggccgcagctgacaatgtctgaggcgaccctcgtaatcccgctttcgatttcgagagggattgagatcttgcttactaaagccgtcaatttttcttttgcctcagctgtgcagctttctccgaaagtcaataatgacacgccggacagcgctctgttcgtaatgctcgggatcactcttgccgcctggcaggagacgatggcttccagctgttcgacctgcaccggactcgtaatggttaccacagtctgatcgcgggtgaagacgggtgaaagccgttttagcaaaggataaatatccagcggctttacacagataaacacggcatcactttccgtaatcacttcttccggccgttctgcaacctgaatgtctgggaatcgtttttttatgtttaacgctttgtcgatcgttcggttagtaattgttaaagatgagggaatgaccgctctggattcaatcaacgcctcaattaaaatggtccccatatttcctgtcccgataaagccgatattcaatcgttctcccctcctttgaacctgtatcttttaaacgatatgaaggcttcagtcaaaatatgtatgaaagcaggtgagcaggtttgacagattggctaaaacaatataaatggcatgctgcgggaggcgttgcactcgtcttgatcatcagcgctgccttcatgctgttaagcggaaagcgtgaaacttcatccggcctctccattcccgaggaggcttctgcacagacgtatgacaagaaggaggaggtgaaacgggaaaaaagcgcgggaaaagaggcggttatcatcgatttgaaaggcgctgtgaaaaatccgggcgtctatcaaatgaaagagggagacagggtccacgatgtattgaaaaaagcaggcggcaccgagaaaaaagcggatcaaaagcaaattaaccttgcagccgttttgcaggacggtatggtggtttacattccatttgagggggaagaggctgctgattctttctcgaaagcgggttcaagggcagatggcgcttccgtcgatatcgtcaatatcaatacggcttcctctgaggagcttcaggcgattcccggcatcggcccttcaaaagcggaagcggttatcgaataccgcgaggagaacggaccgtttcacacggtagaagacataacaaacgtttcgggaattggagaaaagtcttttgaaagaataaaatctgcaatcacggtaaagtaaattgacgtttgcggatcatcatatgtaaacttagggaagtcgacatcgtatttttggagggaaaacaagtggaacggatttcttgggatcaatattttatggcgcaaagccatttgctggcgcttcgcagcacgtgtacaaggcttgctgtaggagcgacgattgtcagggataaacgaattatagcgggaggctacaacggatcgatcgccggaggcgttcactgtgcggatgaaggctgctatatggtggacgggcactgcattagaacgattcacgccgagatgaacgcgattcttcagtgtgcaaaattcggtgttccgaccgaaggcgctgaaatatatgtcacacattttccgtgcattcaatgctgtaaatcgatcattcaggcaggtattaaaacgatatactatgcgaaggattacaaaaaccatccttacgcggttgaacttttcgatcaggcttctgttaaagtggagcaggtagagctcgatgagatgattatcgacttgaaaaaccaggaaaagttggcgtttgtagccgatctgatcaaacagctggctgataaaggccttgaggaagaggagatcaggaaaatacacgaagaggccaacaaactgtttacaagctacgtgtaaccaatggacagacatcgcatcttcccgtgcggagcgatttcagcggcagccggaatcgcctccgctcactcttctctttatctcttcctcgccgtcggtttttttctgttctttatcctctgtttcttcaaaaaacaaatactccttttcgctttatgtgcagcggtttgtattttatattttacttctttttacgtgatcgaccatttcaatacaacgatttatcatgaaggcaaatttcacacgctcgcttctgttcaggatattcccgtaatagacggagaccggctttctttcacagccgaaacagatgagggagaagctttgaaagcgggatatacgctccggtctccacaagaaaaacgggcgctctcagctcttcagccgggcagcctctgtgtcatgcaaggtgaattaaaagagccgaaaaaagagacggttcctggcacttttaatcaaaaagaatccatgtatcaaaaagggattcactggatttttgcagttcagtctattacaagctgcaagccgggcggcggcctgatgccatctctattgaaaatcagaaaagcgggccttgattttatagaggaaaatatggcggactcggctgccggtattggaagagcgctaattttcggagaccggtttctcattgaacaagatgtcctggacggctatcagcgtcttggaatcattcaccttttagcgatttccgggcttcatgtcggtctgctctcagccgctctgttttacatatttattcgcttcggcgtcacgagggaatgcgcaaaatggctgctcgtgatcggccttcccgttgccgcagttttgaccggaggcgccccgtcggtgatgagagcggttttcatgtctgaaatctatctgctggcatcactgtctaaaaagaacttcaaaagtgccgatgtgatcagcattgcctgcctcggactgctgctgtatcatccttatctgttatttcaagccggattccagctttcttttgctgtatccttcgttttcattctttcaaaggagatattgaccaggccgaaaagccgaatctctcagctgctattggggtcatttttggctcagctcgcttccctcccgattctgctttttcattttcaagagttttcatttctcagcacattaatgaatctattttttatacctctttatattttcatcatcatgccgctgtctttcggaagcctgcttgctttcatatgttttcatcccttgggggaggcggcagccgccgttcttgaccgtctgcttgtgtggagccatcaggctgttaaaacggtgtctgccgcggatgtttcggtcttttctgcggctaagccgccggatcttttgttgtttttctacttcacagccatttttctgtttttgctgttgctggaaaaagagatgtcgcttcgtgcggtcatgattccgtccggcctgcttgctgctgtgtttgtgattcacgcatgtcttcctcagcttgcaggtgagggagaggttacaatgcttgatatcggccaaggggacagcatgtatgtcagcgctcccggtcagaatggcacggtcttcattgatacgggaggaaccgtatccttccggaaagagcggtggagaaagcggaagaaggatttttcattgggggagagcgtgttaatgccttttctggcaaccaaaggggtcaagaagctcgatgctttaattttgacccatgctgatcaggatcatatcggtgaagcgcatgtgctgatccaaaaacataaagtgaagcaattgatcgtgccgaaaggcttcgcagccgaaccgtctgatgaaaagctgcttcgccttgccttgaaggaaggcgtcgaggtgaatgtagccaaaagaggtgacatccttcatattggcaatcttgaattttatgttctttcaccgaaagaggcggacaaaaacagcaaaaacaatggttccctcgtattgtggatgaaagcaggcggattttcgtggctgttaactggcgatttggagaaggagggcgaaaaggagatgatggaagtgtatccgaatcttaaagcggatattctgaaagtcggtcaccatggaagcaaaggttcgacgggtgaagagctgatcaagcaaattgagccgaaaaccgccctcatttcggcgggggagcacaaccgctacgggcatccccacggggaagtgctggacatcctaaaccgccacgatgtgaaggtgttcagaacggatcggcacggttcgattcagcacctatttcgaggcgggaacggaacgtttttgctacatcctccatatgataaagtacattccccgcaagaaaaaatgactgctgaaaaacagcagtcgtcaaaaagccgcttgcctgacggagagtaaagcggtgtccatgacttggcttgattaagcggccagatgtataacagtagcgataataaacattgtagcgaaaaagccaaaagacacgataaaaccgacacctgaatctacaagatcgttacgtttgctttgcacgtctttttcaaattcattcacaatttacccctcctattgatatccagtataattcaattctttgcaaaaatctaggagcttcatgcaaccgttttctaaaatttatgaacatcgtcttctataaactgacccgggggtttatggaaggcgtttattataaatgagagagcgggtgactccgcttctctctttactaattgcaaaacacgctttaggatagaaaggaaggatgaaagaggggaaagtgcagatgacggtatttgatgtttggaaaagcttgaaaaaaggcgacattcatcctgtttattgcttgtacgggaaagagacgtatcttctgcaggagacggttcaaaggatcagacaagccgttgttgatgaagagacgaaagactttaacttctcgatatttgatctggaagaagacgcgctcgatcttgccgtggaggatgcggaaacctttccgtttatgggggaaaggcgtcttgtcgtggcgaaaaacccggcgtttttaacagctgaaaaaaagaaggataagcttgagcataatctcggtgtactggaagcttacattacgcagccggcaccttattccgtgtttgttttgcttgcgccttatgaaaagctcgatgaacggaaaaagctgaccaagctcctgaaaaagcatgcgcacatggtggaagcgaaggaattaaccgccaaagaaacggctgactttatcgcaggcctcgcgaagtcggaaggcaaacaaattgaaccggaagcggcggaggagcttgtcctgttatgtcatgcaagtctgtcagccattgcccaggaggttaaaaagctcagtacatataccggtgaccgcggagagatcaccatagaggatgtcagaaagcttgtagcgagagggcttgaacaaaatattttcgaactgatcaataaggtcgtcaatcggaaacgtacagaagcgctgcagattttctacgatctattaaagcaaaatgaagagccgattaaaatgatggcgctgattgctaatcagttcaggctgctgatgcagaccaaatatttttctgaccagggatacggacaaaagcaaatcgcctcaaaccttaaagtgcacccgttcagggtgaagctggcgatcgagcaggcgaggcttttttcagagcaggagcttaggaacattatcgagcagctcgccgtgatggattatgaaatgaagacaggcaaaaaagacaagcagctcctgcttgaactgtttttgctgaagctgctgcagcctcatgaaaaaaacggcctcctttaaagagagccgtttttttcatccttcacgcaagcaaaaaagcttggcatagccaagctttctattatgcagaaagtccgttcacttttttcgctaggtttgatttgtaacgagcggcggtgtttttgtggacaagaccttttttagctgctttatcgattttctttgctgctgcagatagagctgctttcgctttgtctgcttcgttgttgcttacgaaagtttcaacttgtttcatagcagtgcgcattgcagatttgattgttgcgttgtgcgcgcggcgctcgttgtttgtttttgtgcgtttgatcgctgatttaatgtttggcaatgtgtttcacctcctaagacataacctctgttccttttctataggttagatctcaacaatagaacaaattgtattctatcaaacacacccttagattgcaatataaatgtaaagtatttttatttgaaagctccgcttcgcgggaatgtttgcagaccttgtgggcacactaacaccagttatgtttttggagggaatgcaaatatggagaaaaagaagctcgatttaagtcaatatgcagtccggacagacttagccgtggaagcgagggatctggcagaggaaaaggaagcttctccaaagaaagagctgaaagggtttacagtcaaagaatacgaaaaagacgggatcaaaattcagacgatggatattgatgaagaaggagcgaagctgtcggggaaaaaagccggccgctatttaacctttgaaacacaagggatcagacagcaggattccgtattgcaggaaaaagtcgtcgatgtcttcgcaaaggaattttcctcgtttctcgattatttgggcattccgcgggatgccagctgcttaatagtcgggctcggcaactggaatgtcacgcccgactcgctcggccccctagtgacggagaaccttctcgtgacgaggcacctgtttcagctgcagcccgaaaatgtagaggaaggctaccgtccggtgagtgcgctttccccgggagtcatgggcttgaccggaattgaaacgagcgacattatccaaggggtgatcgatcgctcaaagcccgattttgtcattgccattgatgcgctggcatcaagagggatcgagcgtgtgaattctaccattcaaatttcagacagcgggatacaccccgggtctggtgtggggaataaaagaaaagagttaagcaaggatacgctcggcattccggtcatcgccatcggtgttccgacagtggtcgatgccgtcacgatcacgagcgacacgattgattacatgctgaagcattttggaagagagatgagagacgacagtccgtccaggtcgctcgttcccgcggggatgagctttgggaaaagaaaggtcctcaccgaagaagaccttcccgatgaagagcaccgcaaatcgtttctcggtatagtcggaggcctcgcagaggatgaaaaaaggcagctgatccatgaagtcctcgctccgctcggccataacttaatggtgacccctaaagaggtcgatacatttatcgatgatatggcaaatgtgattgcaaacggtctgaacacagcgctccatgaaaatgtatcgcaagacaataaaggaatgtataaccactaagatcaaggcggctggcccggccgctttttttcatgacatttagcattgccggaacttgttctacttcctctatcttgtacatagtctatttactagacaagctctggagggatttacaatgagaaaaagaggcaggaatcgtcagtttgtgctggctgtaaatggaagaagcgcggttaagacagtattcttatttatcgtcagcctgctgctcgtttttattttatcaggcgtgctcacatcgctgcgtcctgagttaaggccgtcttcatcgttgtaccgggtggctgatgaactgaagggcgagacctttgggctcattttgggaatggaaaaccactactttgcatcagaattgccggaaccgaataagcgctttgagctttcccccctcgtcctgaagctggcgaccagcattaatttgaaagatccgcgaagttttctcggacgggagcttccgggattctctcattttgactcggaaatcctcattgccgggcaagggacggattatacgaatatgccgtcagaatctccgccgccgactgaggtcttaaaagaggagagagaagcgaatcttgcagagcttgaagggaaacagaaaaagaaaacagacggggaaaaacctcctgaacaatcgacgggcggccgcaaagtcgtatttatctacaatacgcacaatacggaatcgtatcttccctttttaaaaggtgaggcagatcctgatcgggcgattcattcgaaagcaaatgttacgcttgtcagcgatatgctcgcaaatgcgatgaaatcgcagggcgtcggggcgatggtggataaaaccgattttcaggcgaatttgcggaaaaaaggctgggcctatgcccgttcctatgatgaatcaaggccggtcgtcaaagaggcgatggcccagaacaaagacttgcagtattttatcgatattcacagggattcgcaacggaagaaagcgacaaccgcgactgtcaaaggaaaaagctatgcacgcgttgcgtttgtgctcggcaagaagagctctaatttcgaatcgaacttaaagctggcaaaagagctgcatgaacggatggaaaaaaaatatcccggtttgagccgcggagttatatctaagggagctgccggggataatggcatatataatcaggatttaaacgaaagatccgtcttaatcgaatttggcggcgtagataataaccgcgaagagctggagcgggctgcagaagcgatggcggatgtattcagcgagatgtactggaatgctgaaaaagttgatgcagactccggtgaagacgataagaaaaaacaatagaggcaggtgatcgaagtggcttcttttatgggaaaatgcatattggcttgcgctgtcatgtttttcggcgttcttctcggcatgcagcaggcgaacaacggaatgattgaaatgaaagggtacgaggaccctgatttaaaagcagcgctcagcatatctgaaggggatgcgaaagaggcgtcagtcctcggccatcaaatcgatttggaggaaaaacaaaaagagctggaacagctggaagctttcaacctcttttcctcggccggccgagccctggccgattcggtcacaaacacagcccgttcattgtatgactggataaaggaaaaaacggaataggtaaaagaaaaaacgagccggatgcaggactcgttttttctttttcgggtttagaaagcatatgtgacttagcattgaatcttcacaaccctattgatataatctaagctagcgcatattgcgtttcatagtaggagtgattagtgtgacagataaagaaaaacgattacaaaggcagtcgagaatccgaaatttctctattatcgcccatatcgaccacggcaagtcaacgcttgcggatcgaatcttggaaaaaacggcggcaatcactcaaagggaaatgaaagaacagctcctcgactcaatggatttggaacgtgaaagaggaatcaccattaaactgaactccgtacagctgaaatatcaggcgaaggacggagaggaatatatttttcatctgatcgataccccgggacacgtcgattttacgtatgaggtttcgagaagccttgccgcatgcgaaggcgcgattctcgtcgtagacgccgcccagggaatcgaggcgcaaacgctggcaaacgtttaccttgcgcttgacaacgaccttgaaatcctgccggtcattaataaaatcgaccttccgagcgcagaacccgaacgcgtccgccaggaagtcgaggatgttatcggtcttgacgcttcagaagccgtccttgcttcagcaaaagcaggcatcggaattgaggaaatattggagcagatcgttgaaaaggttcccgcaccaagcggagatccggaagcgccgcttcaggcgctgatctttgactccctgtatgatgcttaccgcggggtcgtcgcctatatcagagtcgtgcaaggtaccgtaaaagccggtcaaaaaatcaagatgatggcgaccggaaaggaatttgaagtcactgaagtcggcgttttcacaccgaaggccgttccggctgacgaactgactgtcggcgacgtcggattcctgacggccgcaatcaaaaacgtcggagacactcgtgtaggggatacgattacgagcgcggaaaaccctgcacccgaagccctgccaggctacagaaagctgaatccgatggtttattgcggcctgtatccgattgatacagcgaaatacaacgacttgcgggaagcgcttgaaaaacttgagctgaacgattcagccctgcagtacgaagcggaaacgtcccaagctctcggattcggcttccgctgcggtttcttagggatgctccacatggaaatcatccaggagcggattgaacgcgaattcaacatcgatttgattacgacggctccgagcgtaatctacgacgtgtacatgacagacggtgaaaaaatcgtcgtcgataacccgtcaaacatgcctgatccgcagaagatcgaccgggtggaagaaccgttcgtcaaagcgacgatgatggtgccgaacgactttgtcggagcggtcatggaactgtgccagggcaagcgcggccagtttattgatatgcagtaccttgatgcgaaccgcgtcagcattgtctacgaaattccgcttgcggaaatcgtctacgagtttttcgatcagcttaaatcaaatacgaaaggctatgcgtcatttgattacgaactcatcggatataaaccgtccaagctcgtgaaaatggatattatgctgaacggcgaaaaaatcgatgccctttcctttatcgttcaccgcgattatgcttatgaacgaggaaaagttatcgtcgaaaagctgaaagagctcattccgcgccagcagtttgaagtgcctgtccaggcagccatcggtacaaaaattgtcgcccgttcaaccatcaaagcaatgcgcaaaaacgttttggcgaagtgctacggcggggatatttccagaaagcgcaaactgcttgaaaagcaaaaggaaggaaagcgaagaatgaaacaggtcggctctgtcgaagttccgcaggaagcctttatggcagtcctgaaaatggacgacagcggcccgaaatcataatcatgagccgccgcagcgtaacacactgcggcttcttcctgtaaaagaaggtgaaaacaatgaaagcagcatatatccatattccgttttgcgagcacatttgccattattgcgacttcaacaagttttttattcaatctcagcccgttgatgaatatttgcgttccttagagaaggaaatggccaattcaatggaggcaaccggacatccggagctgaaaacgatctttatcgggggaggaacgccgacatcgctgtcggcagctcagctcgaacggctcctggattccattcatcgcgttttgaaaccgtccgaaagccttgctgaatttgcagtggaagccaatcccgacgatttatcagctgaaaagctggatgttttaaaagctgccggtgtagacaggctgagctttggcgtgcagacgtttgaagacgagctgctgaaaaaaatcggcagggttcacgagcaaaaagacgtactcgtttcgtttgaaagagcgagaaaggcggggtttgataatatcagccttgatctgatgttcggtctgcccggacaaaccatcggccacctcgcttcatcgctcgatacggcgcttgccctcggtgctgaacactattcggtttattcgctgatcgtcgaaccgaaaaccgttttctacaacttgatgaaaaaaggccggcttcacctgccgccgcaggatcaggaagctgaaatgtacgaactcgttatgcggaaaatggaagaagcgggcatcggccaatacgaaatcagcaactacgccaaaaaaggatatgagagcaaacataatctcacatattggaacaatgaggattatttcggttttggcgcgggcgcacacggttatatcaatggtgaaagaacggtaaatgcgggccctgtcaaacattatatcgacctgattgaacaatccggctttccttataaggaaaagcacatggtcacaaaaaatgaacagattgaagaagaaatgtttctcggtcttcgaaaaactgagggagtaaacaaagagcgctttttcgaaaaatatggaagatctgttgacgatctctttccgaaggtgctccattcgctggaagaaacagggttgattgtgaacacgaacaaaaacgtgtttctaacacataatggaaaactgttgggaaatgaagtatttcaggcattcctgggtgagttataattgacattttgatttcggtttggtaattttgatatacaattagcactcagttgtgccgagtgctaacaggggtgatatggatgttaacaaatcgtcagctgttaatcttgcaggttatcgtcaacgatttcattcgttcagctcagccggtaggatcaagaacgctttccaaaaaggaagatatcacattcagctcggcaacgatcagaaacgaaatggctgacttggaagagctcggttttatcgaaaaaacccactcgtcttcaggccggattccttctgaaaagggctatcgctattatgtcgatcatctgctttcacctggaaagctgtcaaaaacggacttaaacattattcattcgattttcaaagaaaaaatctttgaactcgaaaaagccgtgcagaagtcggcccaagtgctgtccgacctgacaaattatacatcgattgtcctcggtccgagactgagtgaaaaccatctcaaacagatccagattgtaccgattcagcccaagaaggccgttgccattctagtaacgaataccggccatgtggagaataaaacgattaatttcccggcggaggtcgatctttccgatctcgagaagctggtgaatatattaaatgaacgccttagaggcgtgccgatctcagaactgaaagacagggttttcaaagaggttgtcatcttcttgaagtcgcacattcaaaattacgatacgattttgcacgcgctcggcgcaacgctggattcatctgttcaaaccgaccggctgtttttcggcggcaagattaacatgctgaaccagcccgaatttcacgatattgacagagtgaaatcgctattgtcgctcattgagaaagaacaggagattctccggctctttcagtcgactgagtccggaattaccatcaaaatcggcaaagaaaacgactatgaagagatggaaaactgcagcctgattaccgcaacatacacggtcggctcaaaacagatcggctccattgcggtcatcggaccgacgcgcatggactactcccgcgtcgtcggcttgcttcagcacgtatcatctgacttgtcaaaagcgctgacaagtttgtatgatgggtaaggcagtacctgaaaacaaacagaagggaggaatcccttctttatcatgaaactcatcctttaagggaggtgaacacagatggcagaagaaaaacaaaacgaagagctaaacgaacaagaggaactgaacgagacagaagcggagacagccgaagctgaacaaacggctgctgaagctgatgccccggcagaagaaactcaaacagaaatgcttgaaaaacaactaaaagaacttcaagaacgtcttgaagaaaaagaaaataaacttttacgtgttcaggcggactttgaaaactacaaaagacgcgcacgccttgatctcgaggctgctgaaaagtaccgctcccagcgcatcatcagcgatttgctgccggcgcttgacaactttgagcgcgcacttcagatcgatcctgacaatgagcagacgaaaagcctgcttcaaggaatggaaatggtgcaccgtcaaattttggaggctcttaaaaatgaaggagttgaacagattccatcagtcggagagcaatttgacccgaacatgcaccaagctgttatgcaggttgaggatgaagcgtacgaatcaaacgcagtcgttgaggaactgcaaaaaggctataaacttaaggaccgggtgatccgtccttctatggtaaaagtcaatcaataactacatagcaggaggtaaaaatcatgagcaaagtaatcggaatcgacttgggaacaacgaactcatgcgttgcagtgcttgaaggcggagagccgaaagtcatcccaaatccagaaggagcccgcacgactccttcagttgtcgcatttaaaaacggagaacgccaggtgggtgaagtggcgaaacgccagtccatcacgaacccgaacacgatcatgtcgatcaagcgccacatgggcactgactatacagttgaaattgaaggcaaaaagtacacgccgcaagaagtgtctgccatcatccttcagcatttgaaatcatatgctgaaagctatttgggcgaaaccgtgtctaaagccgtgatcacagttcctgcatacttcaacgatgcagagcgtcaagcgactaaagatgccggtaaaatcgccggacttgaagttgagcggatcatcaacgagccgactgcagctgcgcttgcctacggtctggataaaacggaagaagatcagacgatcctcgtctacgaccttggcggcggtacattcgacgtttccatccttgaattgggagacggcgtattcgaagttcgctctacagcgggtgacaaccgccttggaggagacgactttgaccaagtgatcatcgatcatctcgtctcagaattcaaaaaagaaaacggcatcgacctttctaaagacaaaatggcgcttcagcgcttaaaagatgctgctgagaaagcgaaaaaagacctttccggcgtatcttctacgcaaatttccctgccgtttatcacagcgggtgaagcaggtccgctgcaccttgaattgacactgacccgcgcgaagtttgaagagctgtcttcacacttggtagagcgcacaatgggtcctgtacgccaggctcttcaagatgcgggactttctgcaagcgaaatcgacaaagtcatccttgtcggcggatcaacacgtattcctgccgttcaggaagcgatcaaaaaagaaactggaaaagaagcgcataaaggcgtcaaccctgacgaagtcgtagcccttggtgcagcaattcaaggcggcgtcatcacaggcgatgtcaaagatgttgtccttctggacgtaactccgctgtcacttggtatcgaaacgatgggcggcgtgttcacgaagctgattgagcgcaacacgacaatcccgacaagcaagtcccaagtgttctcaacagcggccgacaaccaaacagcggttgacatccacgtgctccaaggtgagcgcccaatggctgccgacaacaaaacgctcggacgcttccagcttacagatatcccgccggctcctcgcggcgtaccgcaaatcgaagtgtcatttgacattgataaaaacggtatcgtcaacgtcagcgcgaaagatctgggcactggcaaagagcaaaacatcacgatcaaatcttcttcaggcctttctgacgacgagatcgagcgtatggtgaaagaggctgaagaaaacgccgaagcagatgcgaagaaaaaagaagaaatcgagcttcgcaacgaagcggaccagcttgtcttcacaactgaaaaaacgctgaaagatcttgaaggcaaagccgatgaagcacaggtgaaaaaagcgaatgaagcaaaagacgcgctaaaagctgcgatcgagaaaaatgaccttgatgaaatcaaggcgaaaaaagatgagctgcaagcgatcgttcaagagctttcaatgaagctttacgaagaagccgcaaaacaggctcaggctcagcaagacggcggagctggcgctaaaaaagccgatgataatgtcgtggacgctgaatatgaagaagtaaacgacgacaaagatcaaaaataatcgaaataaaatgtgctgtgcttaccccggtttgcacagcacatgaccttacaggcgatgaaagtcaaagtcaggatctcttgactttgacttttttcttcctaaaggacaaaaggaattgaaaaaacataatttgaaatgatacaatctaatttatgtgagaaaatcgggagtgtgaagagatgagtaagcgtgattactatgaggtgcttggggtaggtaagagcgcttctaaagatgagattaaaaaagcttaccgcaagctttctaaaaaatatcacccggacatcaacaaagaagccggagcggctgaaaaattcaaagaagtcaaagaagcctatgaaacactttctgatgaccaaaaacgggcccattacgaccagttcggccacaccgacccaaatcaaggattcggaggcggaggtttcggcggaggcgacttcggcggctttgggtttgacgatattttctcaagcattttcggaggcggcgcaaggcggagagacccgaatgccccgaggcagggtgccgatctgcagtatacgatgacactgtcatttgaagaggcagccttcggaaaagagacgacgatcgaaattccgcgtgaagaaacgtgcgaaacatgcagcggctccggcgcaaaaccgggaacaaagccggaaacatgttcacactgcggcggatcaggccagctgaacatggagcagtcaacaccgttcggaaaagttgtcaacagaagagtatgtcattactgtaatggaacgggtaagcaaatcaagcacaaatgttcaacttgcggcggcacaggaaaagtgaaaaaacgcaagaaaatcaatgtcaccatcccggcgggtgtggacgacggccagcagcttcgagtagccggacagggcgaaccggggatcaacggcggtccgtcaggtgacttattcgtcgttttccgcgtccaagagcacgaatttttcgagcgcgatggagacgatatttactgcgaaatgccgctgacatttgcacaggctgcccttggggatgaaatcgaagtgcctactcttcacggaaaagtaaaattaaaagtgccggcgggcacccagacgggcaccaagttccgcttaaaaggaaaaggcgttgccaacgtgcgcgggtacggacaaggcgatcagcacatcgttgtccgcgtcgtgacaccgacgaatttaacagaaaaccagaaaaatattctccgcgaatttgcagaagtgagcggaaatatgccggatgaacaggaaatgagttttttcgataaagtaaagcgcgcctttaaaggcgattaatgattggatgaggagttggtagtatgaaatggtccgaaatctgcattcacacgacacatgaagcggttgagcccatctcgaatattttgcatgaagctggtgcgagtggagtagtgattgaagatccgcttgatttaattaaagagcgtgagaatgtatacggagaaatctaccagctcgatcccaatgattatcctgatgaaggagtcatcatcaaagcgtatcttccgatcaacagctttttgggggagaccgtagaaggaatcaaagaaacgatcaataatctgctgctgtatgatattgaccttggacgcaacaaaatcaccatcagcgaggttaacgaagaagaatgggcgacagcatggaaaaaatattatcatcccgtgaaaatttccgagaagtttacgattgttccgacttgggaagagtacacaccggttcatacggatgaactcatcatcgagatggacccgggaatggcgttcggaacaggcacccacccgacaaccgtcctttgcatacaggcgcttgaaaggtatgtgaaagaaggggattcggtcgtggacgtcggaacgggaaccggcattttgagcattgcttcagccatgcttcgcgccaaacaggttgaaggatatgatctcgatcctgtagccgttgaaagcgcccgcttgaactccaagctcaataaagtcagcgatcatatcgagattaagcaaaataatctgcttgacggcgtcgaaggcgaaaaagacatcatcgtcgccaatatcctggccgaggtcatcttgcgctttacggatcaagcatacagcctgttgaaagacggcggctatttcatcacttcggggatcatccagcagaaaaaacaggaagtcaaagatgcactggtgaaagaaggctttacgatcgttgaggttctttcaatggaggactgggtcagcatcatcgctaaaaaataatcgttagtaggtgtgacaagcgtatgcaacgatattttatcgaacaatcaaaacaagaggtcacagccgcacccgcattctcgatcaaaggcgaagacgttcatcacattgcgactgtgatgaggatgtctcccggagatgaggtcatttgctgtgcaaaagacggccatgaagcgaaatgccggatcgagtccgtcactaaagaagaggttttattgagcgttatcgaatggacgggggaaacacgcgaactgcccgtccagatccatattgcaaacggccttccaaaaggagataagctggaatggatcattcaaaaagggacagagctcggtgcaagctcgtttattccttttcaggcatcgcgctccgttgttaaacttgatgaaaaaaaggcaaagaaaaaacgggaaaggtgggcgaaaatcgccaaggaagcggcagaacagtcccacagaaacgcgattcccgatgtggcgccggttcacacgtttcaacgtttgcttgagagccttgaggacttcgataaatgtgtcgttgcatacgaagagtcatcaaagcaaggcgagacgagccggtttcaatccgtgctcaaaagcctttctgaaggatcatccgtactcatggtgtttggtcctgaaggcggatttacagaagaggaaattgaggcgctaaaagaaaaaggtgccctcgcctgcgggctcggtccgcggatcttaagggcggaaacagctccgctgtacgcgttggcggcagtttcttatcatacagagttattaagaggtgaataacaatggcaaccgttgcatttcatacacttggctgcaaggtcaaccattatgaaacagaagcaatctggcagctttttaaagaagccggctacgaaagaaaagaatttgaaagttcggcggacgtatacgtcattaatacatgcaccgtcacaaatacgggtgataaaaagagccgccaggtgatcagacgggcgatccgccaaaatcctgacgccgtcatttgcgtgacagggtgctacgcccagacttccccggcggaaatcatggcgatcccgggcgttgatatcgtcgtcggtacacaagaccgcgaaaaaatgctcggctatattaagcagtaccaggaagaaagacagccgattaacggcgtcagcaatattatgaaagcgagagtgtttgaggagcttgatgttcctgcatttaccgacagaacgcgtgcttctttgaaaattcaagaaggctgcaacaatttctgcacattctgcatcattccgtgggcgcgcggcctgcttcgttcccgcgaccctgaggaagtcattcgccaggcgcagcagctcgttgatgccggctataaagaaatcgttttgaccggtatccataccggcggttatggagaagatatgaaagactacaactttgcgcagctgttgaaagaattggacagccgtgtgaaaggtctgaaaagaatccgtatctcttcaatcgaagcgagccaaattacagacgaagtcatcgaagtgcttgaccgctcagacaagatcgtcagacaccttcacatcccgcttcaatccggctcaaacagcgttttaaagcggatgagaagaaagtatacgatggagtttttcgccgaccggctgacaaaactcaaaaaagctcttccggggcttgcagtcacctctgatgtgattgtcggcttcccgggtgaaacggaagaagaattcatggagacgtataactttatcaaagaacacaagttttccgagctccacgtcttcccgtacagcaaacggaccggaacccctgcagcacgcatggacggccaggttgacgaaaacgtgaaaaacgaaagggttcataaactgatcgctctttcagaccagcttgcgaaagaatatgcatcagactatgaaggcgacgttctggagatcattccggaagagccgttcacggaaacgggcgaaggcaacctgcttgtcggctacacggacaactatatgaaagtcgttttcgaaggttcagaagacctgatcggccagcttgttaaagtgaagatcttaaaagccggctatccgtacaacaaaggacagttcgtccgcgtcgcggaagacgacgtccgcgaaaacatccgcttatcgtcataaatcatcaattcagccggttcacaaaaaaggtgttccggctttttttgcgaatatcttaagcaaacaaccacctaaaaaggagtcaggatgatgacaaaacaaattgcgcgaatgatcgatcacactgcattgaagccagataccgtcaaatccgaaatcgaagcgctttgcaaagaagcgcgtgtttacggttttgcctccgtttgtgtcaacccttgctgggtgaagctttgcgccgagcttcttaaagagtcagaggtgaaagtatgtacagttatcggctttcctttaggtgcagcgtctccggaaacaaaagcctttgaaaccaggcaggcgattgcagacggtgccggtgaagttgatatggtgatcaacatcggtgcactaaaagaccgcgatacgggaacagtggaacatgacatcagggcggtgacagacgcggccgacggcaaagctcttgtaaaagtcatcatagagacgtcgcttttgacggatgaagaaaaaaggctggcttgtgaactggccgtaaaagcaggcgccgactttgtcaaaacatcgaccggtttttccggcggcggtgcgacagtccgggatataaaactgatgcgggaagctgtcggacctgatatcggcgttaaagcttcaggtggcgtccgcgataaggaaagcgcacttgccatgattgaagccggagcgacgagaatcggagcgagcgccggcgtgtcgattgtcaaagggttaacagcggatgaagactactaatcaaacaaaaaccaggcgtttatcgggcctggtttttgtttggaatgagaaacatgatcagcgaatgaaacagatttgagagcggcaaaaacaatagggacgtgacgacgttgaacagcaggctgaaatgggcaatctgctgggcggggctttcggacagtccggagataaagcctgtgattgatgagagcagagggtatacagctgctacaccaatgacattaaacagaacatgggcataagctgtttgcctggctgcagctccgcctttgaaggatgccatcacggccgtaatgcatgtcccgatgttggagccaagaacaacgctcatcgcttcggtcaatccgacgacaccttgatccataaagctcatcaggatgccgacacacgccgaactggaatgaatcatcgcggtcaaaacggtgccgatgaacaaagcgtaaagcgatgaatcttcggcaagctgcacgatataagcgcccgagtctagctgtgacaacggcacggcaagccggctgaaaccgctgatacagaaaaaaataacccccaagccgatcatgcttacgccgacttgccgaaaaggggattttccggcaatgaaaagagctgcacctgcggccaaaagggcaaaaatcaaaaattccagcttcaccgccaaaaattccgttgtgaaagtggacccgatgtttgtccctaaaatgagcggaatcgaacgtttaaatgaaagagcgcctactgagacaaaccctatgacgatcaccataaatgccgagctgctttgcaaaatccccgtaaatataatactgaccaaaaaagctttcaccggatgatccgtgaaaaacagcagccgcttttcgattttttcaaatgttagtgaaatcaggccttttctcagcatgctcatgcctttgagaaaaagaacgatcaataatacgaacaagatcaagatcatcatcagtttttcgaacagcctcctttataaatatatacagacaagctgccgaaatcatgactgaacaataaaacgattctccttggttgaccttaccggaggcttatattataatgtcaaagtacatgtttatatgtatgtctttttttaaagcagtcgattggtgtattcggagggagggaaagagaatgtcaaaaacggtcgttagaaaaaacgaatcgcttgaagatgctcttcgtcgcttcaaacgcagtgtatcaaagacaggtactttgcaggaagcaagaaagcgtgaattttatgaaaaacctagcgtaagacgcaagaaaaagtctgaagctgcaagaaagcgcaaatactaaaagagggtggatttatgagtcttcttgagcggctgaatcaagatatgaagctctatatgaaaaaccgtgagaaagacaaactgactgtcattcgcatggtcaaagcttcgcttcaaaacgaagcaatcaagcttaagaaagacaggctgaccgatgatgaagaactgactgttctttctcgtgaattaaaacagcgtaaagactccctccatgaattttcaaacgctaatcgttcagatttagtagataaagttcaaaaagagttagacattctggaagcttatatgcctgaacagctgacggaagaagagctgctcgacatcgtcaacgagacgatcgccgaagtcggggcttcttcaaaagcggatatgggcaaagtgatgagcgctgtcatgccgaaagtcaaaggcaaggcggacggcggtctcgtcaataagcttgtcagcaaacaactgtcttgagaaaaagacgccttttaagcaattaaaggcgtctttttttgtgcgtgttcatacaatagaaaagtagtagaaagatgaaacctttgctacatgtataacgtatgtaatgttaatgataataggggaaggaggcctcatccatcattgctgctgaaaaaatttagaatttttgttgctctggcctgcggttttgttttattcttattactaggcgttcatttgaccgtgaaagcggatggagatacagtgtatgtcattccgatcgaagaaaccgttgaaaaagggctttcaaaatttcttgagcgctcatttcaagaagcggaagatatgaatgccaaacatatcatactcgatatcaatacccccggcggagcggtcgacgcagtccttgacatggctgatacgatacataactccgacattccggtgaccgcttatgtgaatagaagggctctgtccgcaggcgcttacctcgccttgaatgcagacgatatttatatggcgcccggcggaaaaatgggagctgccgcgatcattgacacgcagggaaatgccgctgacaaaaagtcggaatcgctgtggctggctgaaatggaagacgcagccaaaaaaaacggacgtgatccgaaatacgctctcgcgatggccgatgcagacgtcgatgctaaagaagtaggggcgccaaagggcgagctgctcacattaagccctgacaaagcgctgaaagtcggctattccgaaggcacagtttcgagccttgatgatcttttgaaaaagctgaatttgaaggatgccaaaatcgagcgtgccgaggtaagctttgccgaaaaggtggccaggtttatcacgcatccggtcgtgattccgattcttctttcaatcggaagcctcgggctgattgtggagctttattctcctggttttgggatccccggctttatgggactcaccgcattgctgctctttttctacggtcatctcgtcgccgggcttgccggaatggaaacgatccttctgtttgcagcaggcattattttaatcattttagagatttttctgccgggcggaatagcagggattgccggcctgatcgcaattgttgcgagcctctttttagcttcgggaagctttaaggtcatggccgtctccattttgattgcaactgctgtttcgatagcggcatccattctattgacaagggtgttgggtaagcgtatgaaattttttaaaaaattgatcttaaccgactcgacaagcacagaaagcggatacgtgtcaaatgaaagccggcgcgatttaattggcaaaatcggcgtcacgtatacaccgctcagaccgtccggaacggtcatcatcgacgatgaacggcttgatgttgtatctgaaggctcgttcaccgcaaaggataagaaagtgaaagtggttaaagtggaaggctcacgcattgttgtgagagaattataaattacatttttaggaggaatataatggatccgtcaacactgtttcttttacttattatcgcagccggaatcatcctactagctgtcttctttacattcgtcccggtcatgctgtggatctcggctttggccgctggtgttaaaatcagcattttcacactgatcggaatgaggctccgccgcgtcattccaaaccgcgtggtgaacccgctcatcaaagcgcacaaagcgggacttgatgttgccatcaatcagctggaaagccactatcttgcagggggtaatgttgaccgggtcgtcaacgcgcttatcgctgcccaacgtgcaaacattgaacttacattcgccagatgtgcggccatcgatttagcgggccgtgacgtgcttgaagccgttcaaatgagcgttaatccgaaagtcatcgaaacgccgtttattgccggtgtagcaatggatggtatcgaagtgaaagcaaaagcgagaatcacggttcgcgctaacatcgaccgccttgtcgggggagcgggcgaagaaacgatcattgcccgtgtcggcgaagggatcgtttcgacaatcggttcttccgataatcataaaaaagtgcttgaaaacccagatatgatttcacaaaccgtattgagcaaagggttggattcaggtacagcgtttgaaattctatcgatcgatatcgctgacgttgacatcggcaaaaacatcggagcgattctgcaaaccgaccaggctgaagccgataaaaacatcgcccaggcgaaagcggaagagcgccgcgccatggcggttgcgcaagaacaggaaatgcgcgcccgcgtcgaagaaatgcgcgccaaagtcgtcgaagccgaagccgaagtgccgcttgcaatgtctgaagctctccgcagcggaaaaatcggcgtcatggactacctcaatatgaaaaacatcgacgccgacactgacatgcgcgattctttcggaaagatgacgaaagaccaaaatgaagaggatcataaataaacaagcccctgtaaaaaggagggagctcattgcttgatatcctgttcgacaatccgattatcatggcggccatcatcgcagccatttccttcatattcaacaagctcggaaaaaacgatgaaaatgaagaagcgaagcgaaaaccggcgcctgaacagcagaggacgcagacgccgaagccgaaacagacggcgcagcaccgtcctgcaaaaaataaaaaccagcggccggcagcggcagctgcaaacagcgcagatatggaagcagagctccgcagaatcaaagaagatgccgagcgttccatgccggccgttgaacggaccattaaaaagcagagcagccgggtgatcaaccggaagcaagagctgctcgacatgaataaaaaaacaatagttcaaggcattgtcctcagtgaagtattcggccctccgcggtcgagaaagccgcattacacaatgaggcgccggcctaaaatttaagtattagaacccccttctcactcatacatatgagatgaaagggggttctttttttatggcgcaaagaaaaaaccgcatcaaagcgtggctgacaagaacactggaaattccccctgatgtcatgatggatcttccgagaattacgatgataggaagacttcacatatatattgaaaaccacagagggcttttgcttttcagcgatacggaagtaaggctgatgctcaaacaggggcagtgcatcattcaaggcaaagactttgtcatcaaaacgattttgcctgaggaaattctgcttgaaggcacgattgagcttgtccgctatatcgattcataagtcggggggaaagaagcgtgaagaataaatggctttcttttttttcaggaaagatccagcttaagataacgggaaaagggatcgaacggttattaaatgaatgcaccaggcgcaacatcccgatgtttaatgtaaagaaaaagaaagacgccgtctttctttatattccgctttctgatgtacatgccttccggaaggtcatcagaggcttcgactgcaagtgcaggttcatcaaacgaaaagggtttcctttcctcgtgcagaagtctaaacggaatagcggcttcacttttggagttgctgcattttttatcatcatgttcctattgtccaacatgctttggaaaattgatattacaggagccaatccagagacagaacatcaaatcagacagcaattggatcaaatcggcgtcaaaaaaggccgctttcagttttcaatgctgaccccggaaaaaattcagcaggcgctcacaaagcgggtcgaaaacatcacttgggtgggcattgagttaaacggcaccgcccttcacatgaaagtcgttgaaaagaatgaacctgacaaagaaaaatatatcggtccgaggcacatcgtcgccaaaaaaggggcgaccatctcgaaaatgttcgtggaaaaaggcgagccgctcgtcacggtgaaccagcacgttgaaaaagggcaaatgctcgtttccgggctgatcggaagcgaagaggaaaagcaaaaagtcggagcaaaagggaaaatctatggtgaaacctggtacaagtcaacagtaacggttcctcttgagacatcatttgacgtttttacgggtaaagtaaggacaagtcacaagctatccctcggatcattttccgtgccgatctggggcttttcatttaaaaaagaagacttctcgcgcccgaagacggagaccgaaaaacactcgctgcattttatgaattttaagcttcctgtcgcttatgaaaaggagcatatgagggagagcgaacaaatcaaaagggtgtactcgaaaaaagaagcagttcttgaaggaatcgaaatgggaaaaagagacatcaggaaaaaaatcggcagagacgggaacattatcagtgaaaaagttttgcacgaaacgagcgagaatggtaaagttaaattgatcatcctttaccaggttattgaaaacattgttcaaacaacaccaattgttcaggagactaaagaatgacagaacacttacttgcgattcatcagcaactggaaagtccgaatgaggctcaagcgctgtttgggaaccaggattcccatttgaagttgatggaggaagagctgaacatttcaattgtcacgcgcggagaaaccgtgtatgtgacaggagatgaagaaacgtttgaaatcgcggacagcctgcttgcctctctcctaaatctgatccgcaaaggaatcgagatatccgaacgcgatgtcttgtatgcgatcaagatggcgaaaaagcagaagcttgagttttttgaaagcatgtatgaagaggaaattacgaaaaacgccaaaggaaaaccgatcagagtcaaaaccatcggtcaaagagaatacatcgccgccatgaaaaggcacgacttaatcttcggcatcggcccagcaggaacggggaaaacctatttggctgtcgtaaaggccgttcatgaactgaaaaacggacgcatcaaaaagatcattttgacaagaccagctgttgaagcaggggaaagcctcggatttttaccgggggatttaaaggagaaagtcgacccttatttaaggccgctgtacgatgcgctccatgatgtgctcggaacggaccatacggcacggctgcttgaaagaggaacgattgaaatcgcgccgcttgcttacatgagggggcggacgcttgacgacgcatttgtgattttggatgaagcgcagaatacgacaccggcacaaatgaaaatgtttttgacgagattgggttttggatctaaaatggtcattacaggcgacattacgcaaatcgatttgccaaagggcgtcacatcagggcttgccgttgcaaaaaagatgctccttgatatcgagggcatttcaattgttgaactggatcagacggacgtggtcagacacccgcttgtcgcccgtattattgaagcatacgaaaagtcaaaataactccgaatggcccgatcgcccgttatcgggtcattttttagtttcccgcgggaaaagaggtgcttttgttgaaaaagaaaaaaagaggcggaaagtttcggcttatccgcttgaataacgggggcttccttcccgtcattctttatgcggctttatccgcgctgatgttcatcctgctgtttttccatgtgaggccggagtccctcgacctcgatttattttcgatcagcgagaatacgatctatgcgccggcgacagttgaagaccaaaaggcaacggctaataaaaagcaggaagcgagagaggaagttcccgaccagtacactttgaaaaaagagtactctgacaacagggtcgaccttgtctcatcgattttcgacatcattaaagaagtgaaaaaagaaagcgcagaaaaagagaaaaaagacaagcaggccccatctgaaaaagaccagatcaaatctgttgaagaaaagctgacttccgatgtgacggactcgctgtcacaggattcagtcaaacacctgctgagggccagcgacggagagctttccatgacgcaggattcggtcatcaccgccgtcaatgacgtgatgagcaaagaaatccgcgcaggaaagctcgatgaagcgaaagaacatgtaacgaaagaactgaagggcaattcgataccttcaaaattaaaaaacgccgctgatgaaatcggacgctttgcgatcattcccaattacgtatacgatcctgacaagacggagcagaagcgtcaagaagcggctgacagcgtacagcaggtacagatcaagcaggggcagatactcgttgaggaaaatcagctgatcgacagggaagtctatcgaaagctcgaattgacagggctcttgagcggagccaacatcttcaaacctgtcggcggactgctgcttttaatcgcgcttttcatctcagctttggtttactatttcgaaaagcaatacagcagccggattccgaaaaacaagtcgctcatgctgttttcgttgatcacagggatcgttttaatcgtcatggaagtgatcagcctgtttcagcagcttgaaatcggccatatcggctatctcgtgccgattgcgatgggcgtgatgctcattaaactgctgatcaatgaaaggctggcgatcctgtcgagcatgattctttccatttgcggaagcatgatgtttaaccagggtgtgacaggcacgttcaactatggaatcggaacgtatttcttaatcagctcgatggcgggtatactgtttttagggaagcataacgcgagggcgaaaattctccaggccggtttatttgtctctctgatcaacatcgttgttctgtttaccctgcagctgattcaaaacacggcgcaaaccgggcttgagatgggtacatatcttgtcatgggggcggtgtccggcatcggatcgtcagttcttgttctcggactcatgccgttttttgaaagcggatttggcatcctgtccacgatgaagcttctcgagctttcaaatccgaatcatccgctgctccgcaaaattctgacggaaacaccgggcacataccatcacagcgttatggtcgcgaacttatctgaggcggcatgcgaagcggtcggagcaaacgggctgctggcaagggtcggcgcctattaccatgatatcggcaagacaaagcggccccaatattttatagaaaaccaaatgaatattgataacccgcatgacaagctttctccgcagctgagcaaaaacattatcattgcccatgtgacggacggcgccgatatgctgagggatcataaaatgccgaaggagcttgtcgacatagccgaacagcatcacggcacatcgctgctcaagtttttttactataaggcgaaagaaaaaggcgataagacgactgaagaagagttccgctatcccggtccgaagccccagacaaaagaggcggcgatcatctcggtggccgacagcgtcgaagcggccgtccgctcaatgcataaccctaatcccgaaaggattgaaaagctggtgcgcgggatcatagcggataagctgcaggacgggcagtttgacgaatgcgatttgactttaaaagagctcaatactatcgcgaagacgctctgcgaaacgctgaaaggcatttttcattcccggatagaatatccggaagctaatcctaaacagaaggtgaaacatacatgagtttaattctagatatcacagacgagaccggacgcgtccctgaagaccggcttgctgaaattgaaaagcttcttcaattcgcagcggcggaggaaggcgtcgcagacggcgccgaagtctcggttacgatcgtcaacaatgaagagatacaaaaaatcaacaaagagtacagaggcaaagattacccgactgacgtcatttcatttgccctcgaagaagacggcgaaggagaggttgaaattatcggcgctgatatgccgcccgttctcggagatatcatcatcagcgtcgataaagcccgggaacaggccgaagaatacggacattcactgatgagggagctgggttttctgacggttcacggctttttgcacctcctcggctatgaccatatgacagaggaagaagaaaaagagatgttcactaagcaaaaggaaattttgaatcgatatgggctctcaagatcctcataaacaaaacgaatggcgccgtctgaaaatgagtttttcaaacgcctttacaggaattatcaagacgttcatatcagagcgcaattttagaattcactgcggagccgccatcctcgtgatcgcctgcggctttttcttcaggctgacgctgatcgaatggaccgtcatcttgatcctgatcggcggaatgctcgccttggagctgatgaatacggctgttgagcatacggtcgacctcttcacaaaagagaaccacccgcttgcaaaagctgcaaaggacgcggcagccggggcggtttgcgtgtttgcagccgtttcgtgtatgattgggttacttatctttttgtcaaaattgttttgatgcccgcccttcgtcgtgcgctattcttacaaaaattttacatttgcgatttgggcgtgaaaaagaagccatttttatgtaaaataaaagtgttagcggtaccatcactgctataggaaggaatacacacattgactaaacaagaattgattgcagaagctttaaaagcaagggaatttgcatatgttccgtattcgaaattcaaagtcggcgctgcacttttaaccgaagacggcaaggtgtacaaaggctgcaacattgaaaatgctgcatacagcctgtgcaactgcgccgagcggacagcgctgttcaaggcttattcagaaggggaaaaatcctttaagatgcttgccgttgctgcggatacgccgggtccggtgtcgccgtgcggcgcctgcagacaggtgatttccgaactttgttcgccaaacatgcctgtcatcttaaccaatctgaatggccaagtcaaagaaatgacggttcaagaattactgccaggagcattttcatcggaggacttacatgacacaggaaagctttaaatcaggatttgtctcgattatcggacgaccaaacgtaggaaaatctacttttttgaatcgcgtaatcggccaaaaaatcgccatcatgagcgacaaaccgcaaacaacaagaaacaaagtgcaaggtgtgctgacaaccgatacatcccagacgatttttatcgatacgcccggcattcataaaccgaagcataaattgggcgattttatgatgaaggtggcgcacaacactttaaaggaagtcgacttgatcttgttcatgatcaatgcggaggaaggctacggaaaaggcgacgaatttatcattgagcgattaaaaggagtcaagacgccggtatttttgatcgtcaacaaaattgaccggattcatccggatgagcttcttgtgctgatcgatgagtacagaaccaggtatccgtttcaggaaatcgttccgatctccgcccttgagggaaataatatcgatacgcttttaaagcaaattgaggattatttgccggaaggtccgcagttttacccgagtgaccaggtgaccgatcatccggagcgatttatcatttctgagctgattcgggaaaaagtgctgcatctgacaagggaagagatccctcacagcattgcggtctcgatcgagtccattcaagaacgggaaaacggttctgtgtatgtgagcgcgaccatcgtcgtcgagcgagattcgcaaaaagggatcgtcatcggaaaaagaggcagcctgcttaaagaaatcggcaagcgggcaagaaccgatatcgaggcgctgctcgggtcatcggtgtttttagagctgtgggttaaagtgcagaaagactggcgcaacaagatgtctcagcttcgtgattttggatttagagaagacgagtattaacggacagaacttgaccgcggtttaatcgtgacaatatctctcgaaatcaaagatatattagaaaaaattgtttaacatgaaatggaggatacaaggtcaagataatcttaagaacttggatgtttaaatagctagttataaacagaaaggtggggctttttatgttgaattttacttggaatgtattttcacaaacaggaagcgttgacacgtacctcctttttaaagaattggaaaaggagaacctggaaagacccgaagtacttgaagaagagctagcgcaaattgactttccaattttgtgatcatgcttgacccctccaatttttggatggtgcacatatgctgacgaaatgtgaaggtatcgtccttcgtacaaacgactatggtgaaacaaataagatcattacgctattgacgagagaacacgggaaaatcggtgtgctggcaaggggcgccaaaaagccgaacagccgcttgtcagcgatttcccagccgttcctttatgcatcttttttattccgcaaatcatccggcctcggcacattggagcagggcgagatgatcgaaagcatgaggaatatccgcgaggatctgtttttaacagcttacgcggcctacatcgctgaattaatcgacaagggaacggaggaaaagaaaccgaatccgtttttatttgagctgctgcttcagtcaatgaggaggctgaatgacggtacagatcccgacattatcgccaacctcatcgaagtcaaaatgctcagcgtgatggggctgtatccggagctggatgaatgtgtgcactgcaaaagcaaagacggcacatttcatttttcgatccgcgacaacggctttatctgccaccgctgttttgcgaaagatccatacaggataccgctgtctcccgcatccgccaggctgttgagactgtttttttattttgacctgtcaaggctcggaaatgtctcggtcaaacaggagacgaaggatgagctgaaaagggttattcagacgtactatgacgagtactcagggatctacctgaaatcgcggcgcttcatggaacaaatggacaatatgaaaaagatgctggacgatgaaaacaaaagttgacaacctcttcatctttttataagatcatgacatgaagattggattcaataatgatgttgcgttgacggaaagaagtaattgcgcacagcctcattgaagcgactccggggcggtgaaagccggggatgagagcgcaatgaaaggcattccctgagcaacttttaaaaaagaggctgagacatttcctctcagcaattagggtggaaccgcgggagaactctcgtccctatgtttgtgggtaaaacaagcatagggacgggagtttttttctgcccaaaccagccctatgccaaaaattaaacttgaaaacacgttttgtggaggtgcttcatttgaatattcaagaaatgattctgaccctgcaaaagcattggtccaatgaaggatgcgtacttttgcagtcgtatgatgtagagaagggtgcaggcacgatgagcccatatacatttttgcggagccttgggcctgagccttggaaagtcgcttatgtggagccgtcaaggcgccctgcggacggaagatacggtgacaacccgaacaggctttatcagcaccatcaatttcaggtgatcattaagccgtctccagacaacattcaagagctttatttagattcattaaaagcccttggaatcgaccctctggagcatgatatccgctttgtcgaggataactgggaaaatccgtcgctcggctgcgccgggcttggctgggaagtatggcttgacggcatggaaattacccagttcacctattttcagcaggtcggcgggcttgagtgcaaaccggtttccgtggaaatcacatacggtatcgaacgccttgcttcttatatccaagataaagaaaacgtctttgatcttgaatggacgaacggctatacgataaaagacctgttcaagatggctgaatacgagcattccgtctatacgtttgagacatctgacgtcgacatgctgttcgaattgtttgcaacgtacgaaaaagaagcaaatcgccagatggatcagggacttgtccatcctgcatatgattatgttttgaaatgctcgcatacgttcaacttgcttgacgcaaaaggggcgatttccgtcacagagcgcacaggatatatcgcaagggtgagaaacctggccagaaaagtggcgaaaacgtattatgatgaacgcgaaaagttgggtttcccaatgctgaaggaggaagaggcttcacatgagtaatcaagatttgcttttagaaatcggattagaagaaatgccggcgcgcttcatgcatgacagcatgactcagctgggtgagaagctggaaagctggctcaaggaaaaaaatattgcctttggttccgtcaagctgtataactcccctagaagactggccgttcttgtcgagaacgtggcggagaagcaggatgatgtgaaagaagaagcgaaaggaccggcaaagaaaatcgcccttgacgaaaacggcgaatggacaaaggcggccatcggcttttcacgggggcaaggagcaagtccggaagatttgtattttaaagacatcaaaggaacggaatatgtatttgtgcaaaaattccaaaaaggccaggatacgttttcattgcttcctgagctccgcgatttggtgacaagcctccactttccgaaaaacatgcgctggggcagcgaagatttaaaatatatcaggccgattaaatggatcgtcgcgctgttcggaagtgaagtcgttccgttttcagtcgctcatgtcgaaaccggacgcacaacgcagggacaccgcttcctcggaaaagcagccgacttgagcgcaccttctgaatacgaagcgacactggaaagccagtttgtgattgccgatccggccaaacggaagcagctgatcgttaagcagcttgacgaactggctgctgaaaagtcttgggacattccgagagacgaggatctgctggatgaggtcaaccatctggttgaatatccaacggtactgttcggttcttacgaagaggaatttctcgcaattcctgaagaggtgctcgtgacaacaatgaaagagcatcagcgttatttccctgtcaaagatgaaaacggcagcttgcttccttactttgtgaccgtccgcaacggagacagccgcgcccttgaaaacgtggcgagagggaatgaaaaagtgctgagagcaaggctttcagacgcttccttcttctataaagaagatcaaaaattaaacattgacgagaatgtgagaaagctcgaaaagatcgttttccatgaagaactggggtcgctcggagataaagtgagacgcactgaggcgcttgctgaacggatcgctgaagtcatcggtgccgatcaagagacggtgcagctgatcaagcgcgctgcacacatttcaaaattcgaccttgtgacacacatggtttacgaatttcctgagctgcagggcatcatgggtgaaaaatatgcgcggatgctcggtgagaaagaagaagttgcgctcgcagtcaatgagcactatatgccgagacaagccggaggacaaacgccttcatcaatcgccggcgccgtcgtcgcattggcggacaaactcgatacggtcgcttcattcttcaaaatcggcgtcattccgacaggatctcaggatccgtatggactgagaagacaggcgagcggcatcgtccaaatcctgcttgaccggaactggggcatttcattcaaagaactggctgcgtttgccggacaggaagcaaacagcgaactgctcgaattctttaaacagcgcctcaaatatgtattaacagcggaaaacatccgatacgacgtcgtggatgccgtgctcgaaagcacgaaccttgagccgtattcggctgtcaaaaaagccgccgtccttgaatcggctgcagccaaaccggaatttaaagaaacggctgaagcgctggcaagggttatttcgatcagcaaaaagagcgaaacgagcgccattgacgcttcactgtttgaaaaccctcaagaagaggagcttttcaaagcttatgaggcgtgcaggcagcaaatagagaccctttaccaagcaaaagattatgagggcgccttcagtgagctgtccaagctgaaagagccgattgaagcgtattttgatcatacgatggtacatgccgaagatgaaagattaaaagcaaaccgcctggcgcaaatggcaagcttggcggagctgatccgatcttttgcaaacatcaatgccatcattgtaaaataaacaccgcagaagacggttgctgacaggctggcaatcgtctttttgctcaaatcgatttttcacatccttgtcaaataccgcctgtctttttcatagaattcaattgtaattgctgttattttagtcttcatatgcgttataatatgttatcgacttttatacataacgaacgaattgtgagcttcggcttaaaggtggtgagtacgatcgaactaaataaacgtcaggagcatattttgcagattgtcaaagagaacgggccgattaccggagaacatatcgcggaaaagctgaatctgacgagggctacccttcgtccggatttggcaatattgacgatgtcgggatttttggaagcaaggccgcgggtcggttatttctacacgggaaagacgggcacgcagctcttggctgataagctgaaaaaactgcaggtgaaagacttccagtccattccggtggtcattcatgaaaatgtctccgtttatgatgcgatttgcacgatgtttttagaggacgtaggaacgctttttgtcgttgatgataatgccatcttagtcggtgtactttcacgaaaagacttgctcagagccagcatcggcaaacaggagctcccttcaatacccgtccatatcattatgacgagaatgccgaacattacgctttgcaggcgcgacgatttcattttggacattgccaagatgctcatcgaaaaacaaattgacgcactgcctgttgtaaaagatacagaaaaaggctatgaagttgtgggaagaattacgaaaacgaacatgacaaaaattttagtcggcttatctgaaaatgaaatcatgtagagtgaacttcaaatggagggatatcatgagtaatcggacgatttatgttgtatcagactctgtcggcgagaccgctgagctcgtagtcaaagcggctatcagccagtttaacggttcatccgagcagacaaatatcaggcggattccttatgtcgaagaccgcggaacaataaaagaagtgatctcgctggcagaagcggacggcggcatcatctgttttacgcttgttgtcccggagattcgtgaatttttaatcgccgaagccgaaaaggcgaatgtcgtgtattacgatatcatcggcccgctgattgagaaaatggagtcggtctacggcttcagtgcgaaatatgagccgggcagagtccgacagctggacgaagattattttaagaaggtagaggccatcgaatttgcggttaaatatgacgacggcagagatccaaggggcatcttaaaagcggatatcgtgctgatcggcgtgtcgagaacgtccaaaactccgttatcccaatacttggcgcataaacggttaaaagtggcaaacgttccgatcgttcccgaggtggaccctcccgaagagctctttaccgttgatccggctaaatgcatcgggttaaaaatcagcccggataaactgaaccatatccgcaaggagcgcctgaaatcgctcggcctcaacgacaaagccatttacgctaatatcaaccgcatcaaagaagagcttgaattctttgaaaagatcgtcggccgcattggctgcaatgtcgtagacgtatcaaataaagcggtggaggaaacggccaacattattcacaacatgatgacaaaaagggtctaagaataaaactcaggacaccccatcctgggtttttgctttgatggttttgggaaaagtgaaaatgatagcatctttaacccatttgtattataataaaaaattgtgataaaataattaacttttaggtttaagcttagtacagaacgaataaactattatgggtatcgtgtcaagaatttcccgaaaaaaactttcgacaaattcttatagatcgattaattttgaaacctgtgtgattttgcctgtatttatagcaggagattgatggagggatggagaattagtcttcttgaaaaagaaaggacgatttttgtcgatgcagacgcatgcccggtgaaagatgaagtgctcaaaacagcggcggatttcgacgtaaaggtggtattcgtggcttcattcgagcattttcaaatcacaaggaaagaagaagagaattggacatatgtcgatccgcacaaagaagcagcggatctgtacattgccaaccatgttcgacctggtgatgtcgtcgtcacacaagatatcgggctggcatcgcttttgcttggcaaaaaggtctatgtgatgtcggagagaggctatcttttcgaagagaactccatcgatcatgctcttttccgccgtcacgtcgcacaaaaattgagaagaagcggacgttacacgaaaggcccgaaaaaactggtcaaggaagaccgggagcgatttgtcaaagagctgcaaaaaatcttgtcgaaaattgaaggatttacgtactaagcagcgaattatgtacgacggagtgttggaacatgggcaatcgtataccagacgaaattgtagaacaggtgcagaaatcagctgatatcgtagaagttatcggagagtacgtccagttaagaaaacaggggcgtaattattttgggctttgtccttttcatggtgagaacacaccatctttttccgtttcaggagaaaaacagatttttcattgttttggctgcggagcgggagggaacgttttttcatttttaagacaaatggaaggctattcatttaccgaggctgtctctcacctggcggacaaatatcaaatagatctgccggagcaggtcgcagctgtatcagcatacagcacaggcagttcggatgaacagaaaatggcggaagctcatgatctgttaaagaaattttatcatcatttgctcgtcaatacaaaggaaggccaggcagcgctcgattatttgcttgaaagaggctttaagatggagcagatcgagcagtttgaaatcggatgcgcgcttgactcgtgggatttcatcacgaagtttttggaacggagaggttttgatcttgcgctgatggaaagagctggactcatcatcagacgcgagaacggcgacggatattttgaccgtttcagaaacaggattatgtttccgattcatgatcatcacggcacaacggtcgctttttccggaaggacgttcaccggggagcagccaaaatacatgaacagcccggaaacgccgctttttcgaaaaagcaagcttctctatcatttccatcaggcccgccttcacattcggaaagaagaaagggccgtcctttttgaaggatttgccgatgtcatttcagccgtcacctccggtgtgaaagaatcgatcgccacgatgggtacatcgctgacggaagaacatgcgaagatcatcaggcgaaatgtcggagaggtcatactgtgctatgactcggatcatgccggttatgaagccacgctgaaagcggcggagattcttcagaaaaaaggctgcaacgtcaaggtggccatgatacctgacgggctggatcccgatgactacatcaaaaaattcggcagcgagaaattcaaaaatgatgtaataggggccagcgttacgatgatgacgtttaaaatgaactatttccgcaagggcagaaacctgtctgatgaaggagaccgtttagcctatatcaacgatgtactgaaggaagtcagccttctcagcggtcctttggaacaggaaatatacatcaaacagctggcaaatgaattttcaatctcatttgaatccttgaaggatcagctttccgtatttgaaaagcaggctgcaagccgcagcagggaaagcagccgccaggactctaaagagcggcaggcggccgtatcgcgcgcccctcggagaaagacggggcttcggccggctcatgagaatgcggagcggatgctcctggcccacatgattcatgaccgggacgtcattcgaaaggttttggaacgggtgggctttgaattcaaccttgatcagcaccgagcgattgccgcttatttgtacgccatgtatgaagaaggagcggacatttccatccaggagctctttaagagagtcgaggatcaggaacttggccagcttctgacagatatcttaatgcttcaggtgaacgaagaattaagtgaagcggaattatctgattatgtaaaaaaagtgttgaattatcgaaattggtcaatgataaaagaaaaagaagctgcaagggcggaagccgagaggcaaaaagactttatcaaagcggcgactttggcgcaggaaattgttaagttgaaccgttcgctgaaataaaccgttatatataataggaaaagcttttggcaatgaatcctaacggaggagcaaaagctgcttgtcctaatcaatatattgtcaatttatgatttgctttcccgtgaagccgtagatgagagagaaggctttactcgtgaaataggaacaaaaaagcgggatgcttttagaattcgtctgtaagttttggaaggagggatccatgaatggctgataaacaagctcacgagaccgaaactgaattcacatttgaacaggtgagggatcaattaacagaagccggcaaaaagcgcggagtgctcacatatgaagaaattgcagagcgcatgtccagcttcgatatcgaatcagaccaaatggatgagtattatgaatttttaggagaacaaggcgttgaattaattagcgagaacgaagaaactgaggatcctaatattcaacagctggccaaggccgaagaagaatttgaccttaacgatttaagcgtgcctccgggcgttaagataaacgaccctgtccgcatgtacctgaaagaaatcggacgggtaaaccttttgtctgcaaaagaagaaatcgaatacgcaaaaaaaatcgaggaaggcgacgaagagtcgaagcgccgtctcgctgaagccaacttgagacttgtcgtcagcatcgcaaaacggtatgtcggccgcggaatgcttttccttgaccttattcaggaaggaaacatgggcctgatgaaggcggtggaaaagtttgactaccgcaaaggatataagttcagcacatacgcgacatggtggatcagacaggcgattacaagggcgattgccgaccaggcgagaacgatcaggattcctgttcatatggttgaaaccatcaacaagctgattcgtgttcaaaggcagctccttcaggatctcggccgcgagccaacgcctgaagagattgcggaagatatggatctgacgcctgagaaagtccgtgaaatcctaaagatcgctcaggaaccggtttcactcgagactccgatcggtgaagaggacgattcacatctgggagacttcattgaggatcaggaagcgacttctccatcagatcatgcagcatatgaattgctgaaagaacagcttgaagatgtgctggatacattgacagaccgtgaagaaaatgtgctccgccttcgcttcggccttgatgatggtcgtacaagaacattagaagaagttggtaaggtgttcggggtaacaagagaacgaattcgtcaaatagaagctaaagcacttcgtaaattaagacatccaagcagaagcaaacgcttgaaagattttctcgaataaacttgaacgggtcaggagatccgttctttttttcacaaaagaaatgaaagcgctattattggtaacccgattatattttacttaatttctttcgaatttgcaaatatccaaaagtgtattttgagtcattataaccttgagatcgaaggaaaagccctttataatggttgttgtaaccgtattcaaaaactggtttttaaatgggaaataaacaatcgcttcatcgtccatttttttgtctaaaatgtgaacttcatcagcttttgtttcataaccggtttactttttgtaaaattaaagtagaattagaattgtttacataaggggcaggggcaaattaaaaagggggatgtaaaatgaaccgcaatccattgataccatttttgttaatcgccattatgggcataggactggtttttatcttatctataaaaggcctttatgacgcaaaagaaattgcaggcgaagggaataaaacagctcaagaagacaaagccgatgcttcgcctgaagaaatttacaaagcgaactgtgtaacctgccacggcgagaattatgaaggtgtgtcaggccctaaactgaaaggcgtcggggaccggatggatacaggtgcgattaaagaaaagattgaaaaaggcggcaacggaatgccgggaggactggtcccggcggaaaagcttgatgatatggccaaatgggtgtcagagattaaatagctttcccagattggctaaaaccgtttaatcacttaaaggattcgcaaagaaagctttgaaaagagctttcgggcgaatcctttttctgttttcgttcaatgaggctcttgctagacaaagagtcgcctcgatagggtgatttgcactattccagcatctgcgattccatcctttcaggcggtgcggcgctatcgaaagtaggtctttattactttttctggaggattcactcatctttgcaagggaaaaaataagcaatccaccctatttaagtaagattgcatctattttactattatataaatggaaaaaatgcagcggatgccctgttgtcatccgtctatttgagtatttccctgaggtgaatcaaatgagtcatgcgagcacattgaatcatatccacagcacgattaaccaaaagctggccgatgtagaaaggcggattgaacgagttaaaacagcaaaaaaggagattgagaaagaacacgaaaccgggattgtcgagatcaggcaaatcttgcaccctcatctgaacagccactggacaggggacttcgccaacgattttgatggcgaacgggatgaggctcatacatctatgtacaacatcgtgaacggaaagtacgaaggctatatttcccagctggagagaaaaatttttgcgctcgaagttgaaaagcacagccttgaattggcgggagcggcagctaaagaggcggatcatttgctttctctgggggaaaaagcggttgatcagttgagcgataaaatccgctcaatcaaaaacagttggagctggttttaatgacgacaatcaagctgaaacatgaaacggtcatcaaaaagctggaggccgtaagagcggcgattgatgccctagacctgccaaaccctccgaaagctgcagggaaaaataaattgacatatacgacaaagtgccacgaacgcgagcagaacattcatcagatggtggccgattacaaaaaagccgtacacaaaaacataaaggatacgaaggaaaatgtcgatttgctgaaagagcaggacaaagcaatcgccagaaaatagcctgaggttagagaggacaattcaatgaaagtatttgaagcgcattctttaattgaagcagcgaataaccgcaagaaacaatacgaaacctttgaggatcaactgcaaacgctcaaaaaagcgtttctcggagtcgccgatttaggtgatgattttcaggggaaaggtgcggataacattaaagacttctacaagggacaggccgagatcgttgacagctggttaaagcttgttgaagcgcagattgctttttttaatggtgtatcaggtgacataaaagacaaaaagctgtccgattcttatgtggaagtctcttttttggatcatgaactgaaaaacgctgatttgaaagcgacggaaatcgtctcggggctcaagctggaaatggataaaatcatcgcaagcatcagcgatatcgttgatttggacaattggacgcttgacgattatattgataaaatgtctaaagcgcaaacaactcggcaaaacaccatcgacgctgtgaataaactggatgaatcgctcaagaccgaatacacaaacttacaagcgctcgacagcgccgtgctcggcaaatattccgggctgatggaagctacaagtcatggaaaaaccgcctcaccgatgtattttagcttgaaatcgttccactcaagcgagatctataaaaatacgatagaagtcgaaaatcaagccgccaattatattgaattcaaaaatgaacaggcagaagcgcgcaggcttcaagaaaaacaagaagaagaagcgaacaagccttggtatttaaaagcgcttgacgctgccggaacatttgtcggagaagtcagcgggtattatgattataagagagccgctgaaggcgtcgacccggtcacaggagaaaagctgacagacggccagcgtgtcgccgccggagcaatggcggcagcaggatttattccgatcgtagggtgggcaggccgagccttcaaaggcggaaaagccatttataaaacaggaaaaggactcatcgccgctgatcacgcgcttgacgcctacaaagcctcaaaaacgttgaacgtcttgaaaatgacggaaatgggcgcctacggccttgtcgcttcaaatgggttctcagaagccgtcacgggcaaggacatgtttggaaacaaagtttctgaagagaggcggaaacaaggcctgatcgaagccaccttgagcctcgtcggtgcaggtgctgtcgcaaaaacggcaaaccacggcgctcaaacattggccaaaacggccggcaaaaacattccgctcgccaaatcgccaaaagcagctctggtgcaaaaaggaaacaacatccttgaaaaggtgaaatccttccaagtcccgacaaacgtccgcgtctacgtcgaacagcctgcctccgcaacaggccaccgcatcggcaccccaattgtccgcgtgaatgttgaaaaaacgccggtgaaagagtttggaattgtgaagatggtgagtggtggggggaacgtcagtaagggagccaggactggtagtaaaatagatgttggaaaagctgatttaggtgttctgcgccaaaaatggaatgttcctaaaactgacactgttgcggttggaaagacagatgtggaaggtttggaaaatttagtatttgagggtggatcccctaaagttagaaaagaagccgggcttcccgatttagactcagtaatgccagatagacctataaaatctccaggaaaaatcgcaagtgcaacaagacatgctgaagaaggcgtgttaaatgattttataagcaaagtagaagctttaggaaaaaatcctgctgaaataacaggaacattaaaaattcaccaatctaatcctaaaggggtttgtccaacctgtattcaaggactaaataatccgaatgtaccagctggagtatttaagcaatttagcgagatgtttcctaatttgacgatagaagtaacttctgagactattcaaggaatcaagccaaacggaagattgaatttagttattaaaaatggtgaatatatttaattgaggagtgtagtatatgtttcaagaatgggaagaattgaatgatgatttaaaatctgcatattatttaggactttgtgaagcaatagttcctacattaaaacaatcaaatgatttcaattttataaaagaagcattagatgcctgctggaagtggcttgaacacaagaatatagaagcagacgatctttatacttacctggaaaatttagatgacacagggattttaactttaatgcagcttgaatcaaatgaagatgatctagatgcttggatatgtattgctgatgcaatatcttatacaatttacaaagcatataaatatcagaaagatgagtatttacctgaaaccatcgaatctattgattcttacgagttatttgaggaatttcatagtcactttagtttattatctaaaaatccaggtcaaaaagaaaaagcttttttgaagtttttgaaaaaagagggggagaaaaaaatttccagggagagcattcaagattttttacttaatagtgtagaataaaaataagaaagttgggatattccagctttcttattttatctaatggatgggaatatcaagaattttagaaaagtggaaaaaataaaaagctccctatttggaacagaggcggtgaagcaaccgaagagttattgaaaaggtggttatctaaatgaattttggtaagaacactcaattagtcgaagaagtaatgagctttattcgtaataacaagatgtttttcaatgagaactttaatgtccctaatttgcgagtcattaataattttagtgatgcccaaaattttgcctggtcacaagatttaaagaagttgatacagtgtgggagcatgttaagtcattagaaactgaaaatattgcagaaaagatatacgatttagatttagctactcagcaagatgaattatacgagtatttcggtgactatgaaaattactctgaacattttcttccgtttgattatgtagatattcatgaggagattgaaggagacctcacaatgtgtgctttaaatcggttggtcaatggaaaaacaaataatttttatgaaaaggtttttgagttatataaagaaggcggatggccttgcggttggaagggaacatatcctaaaggggaatttattgtgtttgtcccatctaacagcaatgaataagaaaaaataaatataatcatttcaagccttgattagctgtatgcttttcaaggttttttagaaatttgatacaggttagtgttgacaatgagttaatgtatataaaggtaaatgaattacaacgaagttcagcctatcacttcctacaggtttgagcataaagaaaagcgtcttcgtagaacagccgaccacatcggcactccaattgtctgcgtgaataagggagggtatcatgaataatatatttttggacaatttgcaaaataaagttaaagtaggctttgttttaacagttgccgaaagagtattttctgtaatcagcaaagatgatgaaaggcatccggaaggaagagaagcattggacaaatgttggttatgggttgaatctcatgccgttactggtgatgacttatacgagctaattgataacgcagactttacaggaatttcagaatttgctgaggaagaagaagactcgaatattgccaggctgtggtcgctactagttgatgctgtcgcttatacttcttgggaagcttataaaaaagaaaaagtaaaacatttgccacaagcgttagagggtataaataaagatagcattaccatctttttaaatagtacggtggaaactggttttatcacatcgaaagaggttgaaaagataagaaagggcattgaggtttatcagagtgcaaaagaggagatccccacaaatagagaagcgtttataaagttattttaattatgaaagaactcaatcgcaagttaaatatatgtttaataaccgctcctaaagttaagaataaagcacttgattgccaagcacaggggatacgattcttatatggaagacccttttttggatcatgaagtgaaaaacgcggatttgaaaggggcggaaattgtctcggggctcaagctggaaatagataaaatcaccgtaagcatcagtgctaccgttcattggacaattgtacgctggacgattatattgataaaatatctaaagagcaaacaactaggcaaaacaccatcgactaaaagtagaactcattttgatgtaaattcaactgtcatattagaatcgcaaaaggccactatatttttaagggaagtacagtgggtcccgctcaaaaagagtacacctaaaactcttaggacatgctcaactaactcatgctgaatctcatgcagggcttatgaaagacacggaagagtaacaagccaataataattgaggctaccaaataaggtggtattaatatgatcacgtataatggaccggttgaagaaccaattgaaaacccgaatgatgattttataagaagtattgtatttgaaaaagacgaggattattggaagcaaggaagcggggattcatgttttgaagtagagggctgtgatgaatggttaattttcttttatgatgaaccatatgggttctttataatgagacatccagactacctcgttccaatgaataaaaatgttgaaatagaaacggtggaacatttagtaggtggggagccaatgaaggttccgtcttgcagctatgtagatcgtggtttagcttaccgtataattaatgagtttactaccactaaatcaatgccgacttttatagaatgggtagatttgtatgaaatagactttgaccatggattttgatctatataaaattattcatatttcattttgtcatacataaaagacaagaagacgatcatgattattgcttgctccaagtaggagagcttgtggacacagtcctttgtattctagtgtcggcagtttggtctggctgtgaaataaaatgatctccgtcagtcatctaatgcaaatagtaaagtactgacacattatttgtataaaacttggtaataaaacaaataagaggacaagacctgaactcaagagacgaatatacaaatcaggagtgaacgatttgtctaattccataaaatcattagaacctataaatataccgtgcggctggttcgttaaatataatgacttaaccgacacacatgaaaaagttgaaccaaataccaaattattagaattagaaaaacaaagatatcatgctgcggtcaaaatcattaaaggccaggatgaatatcttattcatatttatgacaatcatagagaaacgattgacacaatcaatgttgaagatcgcaggcagctagtaaaagagctggaacggatcatttggaaaatagaagcggcggcatttggagggaactttttcatttttgaagggcctcctgactatttacgtcttagaattcctcaaggatggaccgtctcttataataaactaattgatatcgatccagatcagttagaggaggacagtgatgactggtttaactttacgtcatcattactacagttggagcataaagaaagccgcttgattttagatgtcggctggtacgtggatattgagccttcaggcactttttatatgctattaattaagaatttggactgggaaaacccgttagaagacatggaaacgagaagaccggaaaaattagtggaccacatagaagccgcccttcaaaaagcagccgaacatcaatataaatagccagccgatgctttgtttgacttcagcccctcattattaatcgattttagtcagaaaaagttgtattccatgtacctagaaccagcatgttatgaagaatatataccaaaatcattggattggagtttatgaggactttacaagtctagttcctacaaattaaaagtattggataaatcataaagggaaaagtttattttaaaaaagataggagagtttctaatgaatagtaatgatacggtaaccatgttgaatgaggaatttgagaatgatcagacaggtgaaaaggtcgaaggcattacgattatcgtagatggacaatttaaacaagttttagatatcattaaagccaaaagcgacagttaccagaattacactgaaatcatacgggacgccctttttgaaggtgtaaacagcatgacgatgaagctgagaaataaagaataataatgaatgattaaaacatcacccgatttacaaaaagacaaacagagctcccgaatttttgcttgttaaggggctctttttttacaatgatcattctataagacatcttgctgtccggcatcggagtgatgtcccggtaatgaactgaacaatttagatatgatctagataaaggcgttcaaaaaaaggcatgtagaaagttggtttttaaagatgaacatcaacaatatacacgattttaatttaaaccaagaaaatgacttcttaacgatacaaacaaaactaaaaaaacatatcaatctagaaaaccccatcagtaaagacgctctgcaaacctgtgcgggggttgatttagcttattgggagaaagatggtgaagcatttggtgtctgcagcatcatcgtgctggattttcatacgaagcgtgtcattgaaaaagtacattgtgcagggaaaatcgccgtgccttatatcgcagggtttcttgcttttagggagctgccgcttattattaaggcagctaaaaagctgacgattgaaccggatgtttttttatttgacgggaatggctatctccatattaaccatattggattgcgacacatgctgcgttttttctcgaaaagccaacgatcggcattgcgaaaacttacttgaaaataaaacaaactgattttgtgatgcctgataataaattcggcgcttatacagatattgtgattgatggcgaagtctacggacgtgcggtgcggacaaggcaagatgtcaaaccgatatttctatcatgcggacatttgattgatttagacagcagttatgacatcgcgatgagcttaatcaatcgagaaagcaggctgccgattccggttcggctcgcggatcttgagacccatactttacgtggatattacagagagaatccaaaattgaccgagtagaatgttgatttgctgttccagcttggaaagtaaagcgattttttatatgatagtaaaagtaaaatgaatctagaaaagtagtgatgattgtgaatgaattgaagttatcgaaaaggctgcagactgtggcggaatacataacaaaaggggctgttgtggctgatatcgggtctgatcatgcgtatttgccttgctattgtgtgctgaatcgcctggcaagcgccgcgatcgccggagaaatcacagatggtccgtttctttctgcgaaacagcaggttgagaaactgcagttaagttcgctcatatccgtcaggaaaggagacgggcttgaagtgattgaaaagggcgaagccgatgtgatcacgattgccggaatgggtggctcgctcattgctcacattctaaaaacgggcaaggataagctctcaggtaaggagcgtttggttttacagccgaatatccacgctcaacatattagagagtggctctaccaggaaggctatgcactgatcaatgaagagatccttgaagaagacggcaagtactatgaggttctcgtggctgaagcgggcgatcgggatgcggcttacgatggggtttcctttgcggcaggcatgcttgtcggcccatttttggtcaaagaacaaaatgatgtttttatcaaaaaatggtcgcaggagctgaaacatacggaaaacatctatcgacaaattgaagcggctcctccgagtgaagaaaatcgacaaaaattgcttgagctgtcagaacggatagagatcttaaaggaggtacttagaagatgacaaaaacgataaacgggcatgaaatcattcaattgtttgaacagttctcgcctaagtctttagccgttgaaggagataaaatcggcctgcaaatcggcacgctgaacaaaacggtggccaatgtcatggtcacgcttgatgttctcgaagaaacggttgatgaagcgatcgcaaagaacgttgatttaattattgcgcaccatccccctgttttcaggccgctgaaacatgtcatcacagatcagcccggcggaaggctgatcgaaaagtgcatcaagcatgatatcgcggtttatgcggctcatacgaatctcgatgtcgctgacggcggtgtcaacgacatgctagcggaagcgctggaattaaagaacacaaaagttctggttccaacctatgaagagccgctgaaaaaacttgccgtctatgtcccgaaagattatgaagaacaggtacgcacagctcttggagacgctggagccggccatatcggcgcctacagccactgtgcgttttctgcagaaggagtcggcagcttcaagccgctatctgaagctgatccgtttatcggcaagcggggcgagcttgaacgggtcgaagaggtaagaatcgagaccgtttatccggcgggtattgaaaaatccgtgatcaaagcgatgagtgaggcccatccgtatgaagaagtggcctttgatatttatccggtcgagcagaatccgcttcaaaaagggctgggccgcatcggtgaattgaatgaagagatgacactcgaagcgtttgcccgatatgtgaaggaaaagttggaggcgaacggagcgcggatggtgggcaagtctgatgcgaaagtgaagaaggtcgccgtattaggcggtgacggcaacaaatacatccatcatgcaaaacgtatgggcgctgatgtatatgtcacgggagacctgtatttccatacggcgcacgacgccatgatgatcgggctgaatgtagttgaccccggccattatgctgaacaaatcatgaaaaacggggttgcaaaaaagctgacagcgatgtgccgggagaaaaaatttgatgtctcggtctttccatcggatacgaatacgaatccgtttacgtttgtataaaaaacaaaacctgaagctattagcgcttcaggtttttgcttttactttaggcaagattttatgcagcggtacttcgtgactgatcttccatgtggacggatcttcatgatcgaattgctctaaaaagcggatgacttcctttgtaatcggggtcggtgtcgatgcgccggccgttacagcgacggtttctacgccgtcaagccattccagctttaattcgcttaaatcaccgatccggtatgctttcgtgcccgcgatttcttcggagacctgggcgaggcggtttgagttattgcttttcggatcgccgacaacgatcgtcaaatcggcttttttcgcttgttcggacaccgcttcctgacgcacttgggtggccaggcaaatctcctggtggaattcaacatccggatatttttcttttaccttttccataatatcgtggacatcccattgggacatcgtcgtttggttcgtgacaatcagtttctccgcttcaatgtccagcctttccacatcttcttcggtttcaacaagatgaacgatatccggggcgacgccgaccgctccttcaggctccgggtgtcctttttttccgatgtagatgacgtgatagccttcggctttcattttccggattaaatcgtgtgtttttgtcacatcagggcaggtggcgtcaatcgcgacaagacctttatcctcagctattttgcggacttcgggcgaaacgccgtgagcggtgaagatcaccgttcctttgtcgacctgattcaaaatctcgagcctgttcgggccgtcaagcgtataaatgccctctttttcaaatgcgtctgtgacatgtttattgtgaacgatcattcctaaaatataaataggtctcggcagacttttatcgagagccgcgttttttgcgatgaccatggcgtcgacgacaccgtagcaatagccgcgcggcgatattttaattacgttcattcttagtcctcctataaagaagtaagagccgggcatgataaaaagccgtaaaaaacggcttatttttgcagtctctatagacctcattatatctgatcccgcaggagatatcaaagaatgttatatatacagtttaggtttagatcctccggtttttctttttgcagacggaggggctgaacggctctgtttttttctgatttcttcgggtttggatttttcgggttttttggatgacactttaatttcttctttcttttcgccgctcgtttcggtcttgtgttccggttcgtctttttgttgttcgccgtcttctgcttccgtatcatcggaattcagctgtctgaacattttcaccattccggggagattgcggacgagtggtccgtattgctgaatcatcggtgttacttgctgggctacgccgagcgctttttgaacattgccgagcatatttgaaatggtagacggattggccagaccctgaatgcctccaaggccgcttccggttccgccgagacccgctcctgttcccccggatgcggcagatccgggaagaaatttcgagagcaacccctgaatccctcctcctcgcgcgcctgcttgctgctgggcggcgcccattggctgaaacatctgctgcaggccacgctgctgcgcttgagggggctgcattcccatccccggatgtctcggcatcaaggctctgccgggcctttgcggcgcctgcggtcttggctgatttctcatcggctgttgctgaaacatacttgtacctcctttcaaaatccttctcttgatagggtatgcaccaacggtggcaaagtgcctttgtccgccggcccgattggggcgggggtgatggtttttttctgcaggatcagttataatttaatgatggacatgatatcagccttttttttagcagtgcggcataaaaaaggatacataagcgcacaattcagccatataggataaagcttggagcgccggaataacggctttccaagaaggagttgggaaaatgaaacaaacgaaatttgaaatgtacgatttaaagccgtttattatagaggctgttcaccacttgggattttatgagccgactgatattcaaaagcggttaatccctgcggcgctgaaaggagagagcgcgatcgggcagtcgcagacaggtacgggaaaaacgcacgcctatctgctcccgcttttaagcaggatcgatcctgaaaaagagttcgttcaagtcgtgattacggctccgacaagggagctggccaaccagattcatcaggaagttctgaaaatcaccaagtttttagggcctgatgaagcgattcgttcgaaatgtttcatcggcggtaccgataaacaaaaatcgattgacaaattaaaaacgcagccccatctggtggtaggtacgccggggcgaattgcagacctgatcagggagcaggcgctcgatgttcataaagccggttcgctcgttattgacgaggcggacttaatgcttgatatgggatttttggaagatgtcgattttatcgggtcgcatatgccggaaggcttgcagatgcttgtattttccgcaacgattcccgaaaaattaaagcctttcctgaaaaaatacatggccaatccgaggtatgcacatgttgagccgaagcacatcacggctgaaaaaatcgaacacgtgctgataccttccaggcacagggataaaaatgagctgctgctcgaggtcatgacccatttaaatccgtatttggcgattgttttcgccaatacaaaaacaacggccgacgagatcgccgcttatctgacggacaaagggatgaaagtcggacttctgcacggggggcttacgccgcgggaacgaaaaaaagtgatgaagcaaatcggcgatctggaattcacctatatcatagccactgatttggctgcaaggggaatcgatattaaaggcgtcagccatgtcattaactatgaactgcctgatgatcttgacttttacgttcaccgcgtcggccgtacagcgcgcgccggaacatccggaacagcggtgacgttttatgatacatctgatgaagatgcacttgtgaagcttgaacagatggggatcgtgtttgaaaacatgaggattgaaaaaggcgagtggaaaaagatcgatgaccgcaagcgccgtcagaaccgaaaaagaacgcctgatgaaacggatgaggtcgccaagcggcttgtgaaaaaaccgagaaaagtcaagcctggatataagaagaaaatgcagacggaaatccaaaaaataaaaagacagcaaaaaagaaagcaatttagaaaaggaaagtaggggaaacagttttgttgaaaatcggttcacacgtctcaatgagcggaaaacatatgctgcttgcggccagtcaggaggcaagctcctacggcgccaatacatttatgatctatacgggagcgccgcagaacacgcgcaggaaaaaaatcgaggatttgaatattgaagcgggaagggctcacatggaagagaacggcatctctgatatcgtcgttcatgccccgtatattatcaatattgccaatacaacgaatccggccacatttgagctcggtgtcgagttcttgcgttctgaaattgaaaggacgtcggcgatcggcgccagacaaatcgttcttcacccgggagctcatgtaggcgcaggcgcagaaacgggcattcaaaaaatcatcgaaggattgaacgaggtcatcgacccgaatcagaatgtgcagatcgctttggaaacgatggccgggaaaggttcagaatgcgggcggacgtttgaggagcttgcacagatcatcgacggcgttacacacaacgagcatttatccgtctgcttcgatacatgccatacccatgacgcgggttacgatgtagtatccgactttgacggtgtcttaaacgaattcgataaaattgtcggaatcgaccgtttaaaagtgcttcatattaatgacagcaagaatgtcagaggtgcgagaaaggaccgccacgaaaacatcggattcggagaaatcggttttgatgcgctccaatacatcgttcaccacgatcagctgaaagatattccgaaaatccttgaaacgccttatgtaggagaagataaaaagaacaaaaagccgccttaccggtttgaaattgaaatgctcaaaaataaacagtttgatgaagagctgcttgaaaaaatcaagcagcaataaaaaaaggggggcacaccagctccccttttatgatacgtattgagcaaacagctggttcaatagctgcaccgcttcttttgaagtgaccgcttccacttgcttgagcagtttattgcgttcttcttcattaaaaatattgatgttttttcctttcacaagcttttccacttcaagcgcctgttttcttgttacttgaattccgtattgtttagcgtacttcagcacctcgtcagccgtgacctgatttaaacgctgcagcacgatcttttgaaataaaatcacgtccattcctcccctctgaactaatgtatggcgtaaaattaaaaatgtgtcatttttttatttcagtctgttaaatgatatgatagtgataaggaacggtttggccagtttgtgaaaaggagagacagaatggcaaagactcaaaaacagcataaaaaagaatcagcggtcaaaaaagcgtttaggatcgtcatgattcttatcggggctgcctgtgctgccgccagcatcgaattatttctagtgccgaataacatcatcgacgggggcattatcggcatttcattaatattggactacctctttaaagataacccgtatatcaacttcgctctgctcgtcgtcgttctcaacatcccgtttatgttttcaggctacaaacacatcggaaaaacgttcttaatttcaacactaatcggaatcgtcagcttgtcaattattgaaacactgttgcatcatgtagaaggggttacgactcagcccgtcctggcagccgtattcggcggtcttctgctcggattcggcgtagggcttgttattcgtaacggcggttctatggatggaactgagatactcggcattttgcttacgaaaaagctgccgttttctgtcggcgaatttgtcatgttcgtcaatgtctttatttttgcatgggcgagctttgtgtttggccttgagcaggctatgttttcggttatgacatattatattgcgatgaagacgattgatgccgtcattcaagggcttgaagagacgaaagcggtcatcatcgtttcagatcaatacgaggagatttccgattcgctgctgcatcgcctcggccggggaacgaccaagctcaaagggaaaggcggctattccgacgaggacacagaagtgatttatgccgttgtgaccaggcttgaagtgacgaagctgaaatcgattgtcttcgatattgatcacaatgcttttataacgattatggacacgcacgaaacgcgcggaggaaagtttaaaaacgccatccattaggctttcatttacttttttaaagtttatatgtataatttaaagatgaactggtcaatcgtgaaaatggcttgctgcttttcggctgccattttctttttgtgcgataaatcgtaatgattctggagaatttgaaggtgaacgaattgaaacaacctattattgaaatgaagcatgtatcatattcctatgatcatcgcaatgtgatagaagatataaatttgcaaattgaagaagggacttttctcggcctggttggtccaaacggatcgggaaagacgacattgctgaaatgcattttggggctgattaagccgcagacaggcgaacttaaactgtttggcgttcctctcagaaaatttaaggactggagcaaaatcggcttcgtatcccaaaaagcaaacagctttaacaccggttttcccgcttctgtttatgaagtggtggcaagcggtttaaccgcaaagctcggcttattcagacgcatgtccaaagccgataagcagaaggtggatgaagcgatcgaagctgtcggcatcacgtccctgaaagacagaaacatcggcgagctttcgggaggacagcagcagagaactttcatcgcgagagcgctggtgagcgaaccgaagctgctcattcttgacgagccgacggttggagtcgatcaaaaaacagttgaagggttttacaagctgctggagaaattgaatcgtgaaaaaggcattacgctcattcttgtcacccatgatgtcggcacggtttccgataaagtcacacacgttgcctgcatgaataagcatcttcattttcacggcaatacagaagagtttgagtccatgacagatcaagacttgtctcaattttacgggcatgatgttcaagccatcagccacaatcaccatcatcatggaggacacgaataatgctgacacctttttttcattatgagtttttgcaaaacgcttttatttcaggaatattaatcggcctcatcgcgcccttgctcggcgtattcatcgttgtcaggcggctgtcgctgatcgcagatgcgctcagccacgtctctttagccggcatagcagcgagcctgtatgcaggcaaacagtttgcagtgctcgcaggagtcagcccgatctatttcggaatggcgttttccgttgccggctctttaatcatcgagaggctgagaacggtttataaacattaccaggagctggcgatcccgattatcatgtcggggggaatcggcatttccgttatttttatttcgcttgcggacggattcaatacggatctgttcagctatttattcggcagcgtcagcgctgtttcacgggaagacatgctggtgatcgtcggcatttccgcagccgttttgatcgtggtgttttccctttttaaagagctgtttcttctgtcgtttgatgaagagcatgcaaaagcttcagggatttccgcaaagtggattcattttatttttattttgatcgttgcgcttgttatcgccgcctcaatgagaatcgtcggtacgcttctcgtttcagcgctgatgacgctccctgtcgctgcgagcatgcgcattgccaaaggatttaagcaggcgattttcttatcgatcctgttcggtgaactttccgtcatcgtcggccttgtgcttgcctatcatctcgatcttgcaccggggggaacgatcgtgatgctgtcgatctttatcctgatactgtgcatcagttataataaagtcaaaaggaggattcgccgtgaacgtacaggaagcgcttgatttactgaaggaaaaaggatataaatatacaagcaaacgggaggatatgcttcagctgtttagtgattcagataaatatttaacggcgaaaaatgtcctttccgctttaaatgatgattatccggggctaagctttgatacaatctacaggaatttgtcgctgtttgaagaactcggcattttggaaacgactgagctttccggtgaaaagctgttccgttttaaatgttcttctgctcaccaccaccaccattttatttgcatggtgtgcggcaaaacgaaagaaattgagctatgtccgatggaaaagctgacagacgatcttgacggctatcagatcagcggccataagtttgaaatttacggaacctgcccgcgctgtgaagaagaaagcacggaagcgcagtaaagggagcggcatatggcggttaaagccatatgcctttttttaacgcaaaaagcatgtaagataaaacctcttacatgctttttgcggctttaagcgttttctcgttctttttcagccattcggcggcttcaagccagctgtcgactctgacgatgtttgaatcggtcggaagctgattgtacggcgtattaaacaacagaacaggaatgcctgcttcttttgcgatcatggttgcattcccgtggtggtcttcaaagaaaacatcgatctcatgtctgaagacggcttccaatttatcgtgaccgccgacaagttctatatggtcataatgaatgtcgcgtttctcgaaccagtcataggtgatatcctccaggtgatgtcttcttgctgtaatatatatcagcttatgctgctttttcagctcatccagcgtctgtttggcatattgagccagcaatgcttcctgatagatgcggggctcgttttcgttcatccatttccaaaaatcttcttgagatatattcagcagctttgtcaggtcatattccttaatatcttccaatgtaatggagaggctgaacgactcgttcaaatagggaacaaaagtatcctgggcagtgatcgttccatcaatatcgattcctaaatgtaacatgtccacactccttatcatccattcctccagtgtatcataatcttttaacatttacagtaaagtttagcaaacatgaatcgggctaaaatgcttaaactataaatgctcctggattaaagaggggggatatcgaatggaaagagatcaaaatgttcgcgatcgtaaccgagcaggttatgatgctgacttagtcgatgcgactttagataatgatgaatttttagaagaaacagcagcagaagttgccccgacctatcgtacggataacggggacaacggcgaagcgcgtaacgatgccgatgctgccggcggacgtgtaaccggatatattgcgcttgcgctttcgattatttccttgtttatgcttccagtgctgttaggaattgcagggatcattgtcggttatatagccagaagacaaggagcagctggcttaggagcatgggcaatgggtatcggtgcagtttccttggtgcttggcatattcatcaccccgtttttctaacggaaaaagcttgacggatatccgtcaagcttttttttattatgtgtttaatttttctttttctgccgcttgtttggcataatgctcttcggcgagcttgtcgatttcctttttcaattcctcgaccatcgtttcttcaggcactttccggacgatttcgcctttgcggaacagaagtccttcgccgcgtgcgccggcgatcccgatatcggcttcgcgcgcttctccgggaccgttgacggcacagccgagaacggcaactttgatcggcgccttgattttcgcgatgtaatcttcgacttcattggcaatgctgatcaaatcgatttcgatccggccgcaagtcgggcaggaaatcaatgttgccgcattggaagcgagcccgaaagatttcaggagctccctggcgacttttacttcttcgaccgggtccgcgcttaaagaaatccgcaatgtattgccgattccttttgaaaggatcgcgccgagacccgcggcgcttttcactgtaccggcaaacagcgttcccgattcggtgatgcctaaatgaagcggataatcgaaagctttagccgctttttcatatgcctcaatcgccaggtttacatcagacgccttcatgctgacgatgatatcgtggaaatcgagatcctcaagaattttaatgtggtgcagggcgctttcgaccatgccgtctgctgtcggatagccgtacttctcaaggattcgtttttccagagagcctgcattgacgccgatccggatcggaatgcccttttccttcgctgcgttgacgaccgcttcaaccttttcgcggcggccgatgttacccggattgatgcggattttatcggctccgccttcgatcgcttttaatgccaatttatagttgaaatgaatatccacgacaagagggatggatatccgctttttgatctctggaatggcgtcggcagcccgttcatcaggacaggcgacgcggacgatttgacatcctgcttccgcgagtctgttgatttcggcgacggttgcttcaacgtcatgtgttttcgttgttgtcatgctttgaatgacgacttcgttattgccgcctattgttaaaggtcccactttaacgggacgcgtttttgtacgatgtgtgatttcactcacttgaattcgctccttaagtataattcggaggcggttgctccttttcttataccaaatcgtttacaagtcttattgtaacagcccgttcatgaaactgacaagaaattaacgcttaatcaggataaacgggaaacttgtaggtgacacctgcttgaatgcggcccgcctcaacattcggattcaactcttcaaaatcttcggctattttgtcagccggaacggcgctgttcccgatgattgaaaataccgtttgtccgggctttaccgtaacggacttatattgcaggcttgcagccggagcttccgctgccatggttgaagccggtaaggcgttttgagggatggtgcctgatttcaagtcataataaacaatgaacagggcgagcaaaatcgaaaacagcacaatgacacgtttcatctgatttgtccccatttcgtgcattttttattatgttacgcttgtccctcttccaacatgacaacaaatttgctcctgcccgctttacctcgctgctttagaagccggcgtttctttaatggcgagaaacagcatgataaagttcacaaaccagttcaggaggaactgacttggaaccaccgcctccagcgcgtccataattgcaaaaaacacggttgcgagggtgatggaataagcagacattacccaaagctgcttataggagagcattttcttctgcccgttgcgaatgatcagcccgatgacggcgagaaccgagacatcaatgaattttccggctgccgtcgccaggaacagcagaacgcacaagacgggaacaatcaccgctttattttgatcaactaaagaaagaatatcatccttagacatgtcctcgggaagcattgtgtacggcatttcctggacttggccgtcaatggcgatgacgaacttatctttcaggatgccgacggaattgcgtttgtcttcgatctgttttgtttcataagagccgctcggatcaaaaacgatgacaaatccgaatgactgtgattcaatcgctttctttgcatctgtttgcagtgtgccgtcttttatggagaaagcggggaattctttcacagctgactgaaagctgttcatcgtattcaccactccgctgctgatatggtaaaggttcgggagagcggcgatcacgctgagcaaaaatacgtataaaatcgtttttcctatgccttggaaacgcattttcccaatagcttgaggggaatatgtacttttaaaaaatcgctgaaataaattcattcggttttcacttcctatttctataatgtatctgcattattgtatcgtcacaaaaggacgaatacaagaaaacttatcgatcaacaggcgctctggaagtttcctttcagaaaaatgggtataatatgaagcatcacaatcgattggagggattcggatggatgttttgtattggatcatcattgcggcaatgttcgtcattgctttcatcggccttgtctatcccattattccgagcgtcgttttcatcgtagccggctttgttctatacggatttttatttacattcgggcattactcctacctattttggatcattgaaggcatttttacagccgtattgtttgccgccgactatattacaaatctcctcggcattaagcgctttggcggcagcagggcagcgatatggggcagcacgatcggccttctggccggaccgtttgtgataccggtggcgggcattattttgggtccgtttatcggggccttggcgggtgaggtgattgtccatcagaaggatttaaaaacggcggccagaatcggaatcggttcattgatcgggtttatttcaggcgtttttgcgaaaagcgtgattcagctgataatgatcggctactttttatatactgtgctctaaaattttcccctgcatgtttaaaaagaaggggaaaaggataaagtttagtgagcgcttgaaatgcatttgtgatcattttgtgagcatttccattgaaacaagccttttcttttgataaattgaaagaggaaaggcttgctaaaggcggcatttcaatacatacaatattaaggaggaattgataatggcttacaaacttccagaattaccttatgcttacgatgcgttagaacctcacatcgacaaagagacgatgaatattcaccatacgaagcaccataacacatatgttacaaaattgaacgaagcggtggcaggcaaacaggatcttgaaagcaaatctgttgaagagcttgttgcaaaccttgatgcagtaccggaaaacatccgtacagctgtccgcaacaatggcggagggcatgccaaccactcattgttctggaaacttctttctccaaacggaggaggcgctccaactggtgaattggcagaagccatcaacagcaaattcggcagcttcgatcaattcaaagaagactttgcggctgcagcagcaggccgtttcggctccggctgggcatggcttgttgtcaataacggagagcttgaaatcacaagcacgccaaaccaagattctcctctttcagaaggcaagactcctatcttaggtcttgatgtatgggagcacgcatactacctgaattatcaaaaccgccgtccagattacattaaagcattctggaacgtcgttaactgggatgaagttgcacgcctttacagcgaagcaaaataatccagcttgagaaaagaggcccgcgagaagcgggcctttttatgttgtccgcgaagcggagcgtctgctgaaagaccggcgaaaagccggtctgtttgtttttcgtttcttttgctctgaagtacataactgacttttgatgagacagactaatggtgatcagtaaaggggagtcagttatgagcagaatcaaaaacataataggcgatgtggaattaaacagggacctcctgctgctgcttgcagtcggcggcctttattctcttagcattgccctttccaatacgtttgtgaatgtatatctgtggaagcagtccggacagtttgtcgatttggccatttataatttgtcgatcgtcgtgatgcagccgattatctttatgttcgccggccgccttgccaaaaaaatcgacagggtttttatactcaggtttggcgtttcgtttttagctgtattttatttaactgtgctgttggcgggggaaaatgcgggatcacggctggtgctgctcggaagtgtgctcggaattggctacggattttattggcttgcgtttaatgtcctgacatttgaaatcactgagccggacacgagagatttttttaacgggttcctcggcattttaaattccggcgcgggaatgatcggtccgattgttgccggctatgtcatttcaaggcttgccgacaacacgggatacacggtgattttcagcctgtccttggctttattttcagtggccgtcattacgagcttttttttaaaaaggcgtgaatcgcgcggccgctacattttgaaaaaaatctggacggaacgaaattcagacccgaattggcgcagcattacaaatgctcatttttttcaggggctgagagaagggattttcgtttttttaatcaatgtctttgtctttatcacgacaaagagcgagttggcattggggaagttcggcttgattaattcagctgtttctttttttgcatactatttcgcaacgcggcttattaaaaagggagcgcgcaaaaaggcgattttaatgggcggtctcgtcctgttcggcgctctctttctgattttgtttcatatgacgtatgtgacgcttttgctgtatgctgttgcgattgcgatcggctatccgattttgctcgtaccgtattcatcgctcacatatgatgtgatcggtaaagcgaggtatgcccggaaagcgcggatcgaatacattgtcgtcagagaagtttttttaaacatcggacggattgtctcgattttggtttttttgctgctcgtgtcgcttctgaaggaggacttgggcattccggtttctctcgttttgctgggggcaggccacacgctgatctactatttcgtcaaagatatccgtctgacagagcccgcccgcgaaacggtcggaaaagatgcgcataaacaaacagctgaaccgaattatttagaaggaaaaaggtaagccccaagggaaaatagtagaaaaatgccgaaaaaaactttacaatatatttggcaccttttcataaggtgtcttttctttatttcaaaaaggtgatgctaatgatgaacaaaaaaatgaaaaatgaaaaacgcaaatcgctccccatcaggttgaacatattgttccttctcgcttttattattttcaccatcgtcgtcgtgcgcctcggcatggtgcagatcgtctttggcgaagactatacgaacgaagtgcagaagcaggaagaagtcgatgtctcgacaagcgttccgcgggggaaaatatatgaccggaacttgaatacgatcgtgaaaaataaaccgatgaatgccattacatacacaaggacatcatcgacctctcaggaggacaggctcaaaatagcaaaaaaacttgcagaaatgatcaaaatcgatacagataaaataacggagcgcgataaaaaggactactggattttaacgcgcccgaaagaagccgagaagctcatcaccgatgaggaccggaaaaaagtcaaggacggcaagctgaaggaagacgatttataccagctgcagcttgacaggatcacggaagataaactgaatgaattgacagatcaagatttgaaagtcttggcaatcaagcgtcagatggattctggatacgcgctgactccgcagtatattaaaaacaaaggtgtaactgcaaaagaaatggcggttgtcagcgaacacctggacgagctcccgggagtcgatgtgacgtctgattggaagcgggattatccttataacggtctgctcagaacgatgatcggcagcatatccgattcaaatgaagggcttccgaaaagcctgcttgatcattatttgtcgctcggctacaaccggaatgaccgcgtcggaaaaagctacctcgaagccgaatatgaaaatgtgcttcagggacagaaagagaaagtgaaaaatattaccaataaatcaggggatatcgtcgatacggaagtcatttccgaggggaaaagcggaaaggatttagtcttgacgattgatgttgatatgcaaaaagcgattgaaaaaattgtcgaggatgaactgaagtctgccaaagccaagcatagcgctccgcttctcgaccgcgcattcgtcgttatgatggatccgcgaaacggggaagtgttatcgattgccggcaaacagcttaaaaacgaaagcggcaaattaaaggttgacgactatgcgctcggcgcgatgacgtcttcttatgcgatgggctcggctgtcaaaggggccactgttttaacaggtctgcagacgggagccattaatttaaatacgacttttcttgatgaaccgctctatatcggaaaaggaaaaccgaaaaaatcttgggcgagcaacttgggaacactgggtatccagggagctcttgaaaagtcttcaaacgtgttcatgtttaaaacggcgatcgcccttggtaaaggccaatataaggcgcatcagccgctcgaccttcaaacaaaagcatttgatacattcaggtattatttcagccagttcggcctcggcgtcaaaaccggaatcgatctgccaaatgaagcttcaggctacaaaggatctcaaagactgcccggtttcctgcttgacttttccatcggacagtatgacacatacacaccgctgcagctggctcagtacgtgtcaacgattgccaatgggggataccgcatgaagccgcagcttgtgaaagagatcagagagcccgattcgaaaaaaggaatcggagccgttacacagtctgtgcagcctgaagtattgaacaaagtggacatgagcgatgaatatataaaagaagtccagaaaggattcaggcgcgtaatgacaaaaggtacggcagcgggacagtttgcctctgcttcatataaaccagctggaaaaacaggaacggcccagtctttctatgacggaccggacaaatcgaaaacgggaacatcgacatacaatacaacgcttgttgcctacgcaccttacgataatccggaagtcgctatttccgtcgtcgttccttgggtttataatgactatggccagagatattcgatcacaaacgaaatcggccgaaaagtgcttgataagtattttgaactgaaatcaaaacaatcaaaagaaaatactgtcgaaaaaaataaagacaaaatcgaaaaagaagctacagaataggactttttcattaaaacacctgcattgaaccatgcaggtgtttttttgtgcgcccgttcttttcgtgcgcattctatacaaagttcaagcttaatttacaaaaccttaataattcatttaaacaagattaatactgaaaagttacgctatacccgtaggacaaattacacatttacgcgggaggattaagaagtgaaaccatttaaaaaaatcacactgatgttcatcatgtccgttttagttgtcttcgcagcagcttgtggaagcagcagtacaaacaacaatgcagacgaaggcaaacaaagcgataaaacagagaataaggcttcaggttctttgacgatttcgggttcttcggcgatgcagcctcttgtcttagcagcggctgaaaaattcatggatgaaaatcctgatgccgatattcaagttcaggctggaggttctggtacaggcctttcccaagtggctgaaggcacagtccaaatcggaaactccgatgtctttgccgaagaaaaagaaggcattcctgccaaagaacttaccgatcatcaagttgcggttgtcggaatggcagctgccgttaaccctgaagtaggcatcgatgacatttcgttagaagatctcaaaaaggtattcacaggtaaaatcaaaaactggaaagaactaggcgggaaagatcaaaagatcacccttgtcaaccgtcctgattcttcaggaacccgcgcgacttttgtcaaatatgcacttgatggagagactccagctgaaggaatcacggaagattcttcaaacacagtgaaaaagttaatcgctgaaacgcctggtgcaatcggatatcttgcgttctcgtatatcaaggatgatactgtcactccgctttcaatcgacggcgttaagccgacagccgaaaatgtacaaaaaggcaaattcccgatctgggcttaccagcattcttatacgaaaggcgaacctgaaggcttggcgaaagaattcctcgactatttgatgagcgatgacattcaaaaatccatcgtgacggagcagggctacattccagtaacagacatggaagtaaaacgcgacgcggatggaaagcaaactgataaataatgacaatagaaggcgggaaagtgtgctcctgacactttccctcttatgacttgttcttataggagtgtaaaaaatggttcaaaaaatagagaaactgtccgcgaaagagcggctgatcagctccaagcataatcgcaaaatggatgaaatccgcgggaggattttggttgcgtcgtgcgcctttatcatgatggcggcagcgatttcgatcacaatttttctcggaaataaggggttgcaatcttttctggccaatggtgtaagtccaattgagttcttaaccagtctagattggaatccaacgaacgaaaaccctgaatacggagcacttccgtttatactcggatcttttgcagtgacccttcttgcatctttgattgctgcaccgctaggaataggaggtgcgattttcatgacggaaatcgcgccatcatggggcagaaaagtgctgcagccggttgtcgaattgcttgttggcattccttccgtcgtttatggattcataggccttacagtgttagtgccgttcatttcacagtttaagtcaagcggatcgggccacagccttctggcgggaacgatcgtcctggctgtcatgattttgccgacggtcacttcgatttcaacggatgcgctcatgtcgctgccgaaaaatctccgcgaaggatcatacgcattaggcgcaacccgctggcagacgatccgcaaagtgctgataccggcagcgctgccttcgcttctgacagccgtcgtcttgggaatggcgagggcgttcggcgaagcgctggccgtgcagatggtcatcggaaattcccgaaatctgtttgagagccttttagaccctgcggggacattgacaacgatcattacgttgaacatgggccatacaacatacgggagcgtggaaaacaatacgctctggtcaatggggcttgtccttctgatcatgtcgttcttgttcatcctgctcatccgctatctgtcatccaggaggaaactgtaatgaacagcaaagtaacagatcgtttagcaaccggtgtttttggattgattgctgcggtaatcgccgctattcttgtcggtttgttcgcttatatcatcatcaatggtgtttcgcatatcagcctcagctttttaacttcgcgttcaagtgcgctgtcaagcggcggaggaattcgagatcagctgttcaactcgttttatattctcgtgctgacgatgctgatcacggttcccctgggagtcggcgggggaatttatatggcggaatatgcgcccgcaaacaaattgaccgattttatccgtgtctgtattgaagttttgtcatcccttccttcgatcgttatggggatgttcggcatgctgatgtttgtaaatctgaccggatgggggtacagcattatcggaggagcgcttgctttgacgattttcaacctgcctgtcatggtcagggtgacagaagatgcgatccgctccgtacctaaggagcaaaaagaggcttcccttgctttaggcgtgtccaaatggcacacgattaaaacggtattgattcctggcgcggtgccgtccatcatcacaggcgcgattcttgcgtcgggccgtgtatttggcgaagctgccgctttgctgtttacagccggactaaccacgccgagactgaattttgccgattggaatccgttttctgagacatcgccgctcaatattttcagaccggctgaaacgctggccgttcatatttggaatgtaaacacacaggggatcatccccgatgctgaagcgatcgcaaacggcgcatccgccgttctcgttctgtccgtcttgatctttaacctggcagcccgatggctcggctcttttattcataaaaagttaacggcaaacaaataagaaggaaggatgaaatcatatggctcaggttcagatgccggttttggaaaccgtgcgcgacaatatcggaatcgctccgttccctgaagcgaaagagcatattttagaagtgaaaaatttaaatatttactatggagaaaagcgggccgtcaacgacatttccatgcgtattgacaaacatgcggtcacggctttgatcggtccgtcaggctgcggaaaatcgacttttttaagaagcatcaaccggatgaacgatctgattccatcagccagaacatccggagaaatacggtatgaagggcttaacatccttgattccaatatcaatgtcgtcaatctgagaagggagatcggcatggtatttcagaagccgaacccctttccaaaatcgatttacagcaacattacccacgcattaaaatatgcgggcgaacggcggaaatccgtgcttgatgagatcgtggaagaaagcttgacgaaagccgcgctgtgggatgaagtgaaagacaggctgcatgagtcggctctttcgctgtcaggcgggcagcagcagcgtctctgcatcgcccggacgctcgcgatgaagcccgaagtcctgctcttggatgagcctgcttcagcgctcgacccgatttcaaacgcgaaaatagaggaattaatcgtcggtttaaaagaggaatactcgatcatcattgtcacgcataacatgcagcaagcttcaagaatttccgatcaaacggcgtttttccttaacggagatttaatcgaatacgatcgtacggaaaagatttttatgaatccttcagaaaaaaagacagaggattacatcaacggcagatttggataaggaggggccggtatgagcgctgtaacagctgtaaagccagaagatgtataccagatcaacgacttgaatttatggtacggcgaacatcacgcattaaagaacattaacttgacaatacccgagtacgaaattaccgccatcattggaccgtcagggtgcggaaagtcgacattcattaaaacgctgaatctcatgatcaatatggttccgaatgtcaaaatgaccggagagatcagctacaacggaacgaacgtactcaacagcaaagtcgaccttgtcgagttacggaaaaaagtcggcatggtgtttcaaaaaggaaacccgtttccccagtcgatctttgataatgtcgcatacggaccaagaatccatggattgaaaaacaaaaaagaactgaatgagagagtggaaaaggcgcttgtggatgtagcgctgtgggatgaagtgaaagaccgtcttcattcccaggcgctcggactttccggggggcagcagcagcgcctctgcatcgcaagggcgctggccaccaatcctgacgttctcttgatggatgaaccgacatccgcccttgatcccgtttcaactttgaaaatcgaagagctgatgctcaagctgaaagagaaatatacaattgccatcgtcacgcacaacatgcagcaggcctcgagaatttccgatcaaacggcgtttttcctgatgggcgagctgattgagtgcaatgatacggtcaaaatgttttcaagtcctgacgatcatcggacgaaagattatataacaggccggttcggatgagaaagaggctgccgttttaaagcggcagcctcttttttcaccggcggcgagacaataaaaaaagcaggctgattcgttccagcctgcttttttatttggacagcgttttgacgatgtttttcaagctgtcaccgcgcttcagttcgtatttacctgcgcggattttagattcgtttccggtctttttcacataatctttgaagtcatcggcggaagaaattacttttccttttgcaaggaggtctgctatctcagccgtgctcatgccgcttttgatttcaagcttgtacttggaaccttttttcgcatcatcctgctcttttttgttttgagacgcagcatcctgcttcagcgcggtctctttatagtggagcagctgttggtattcctcgcgtttcagcgaaacctgctgattgtcctttaaataggttttgacatcggcttcgctgatgttttgagcctccttggaagcttcagcttttccgttatccgtcaaataaaatgcgcctgcaagaacggcggtagccaaaatcattcctccggcaaatgcttgtacactttgtctggtcatacaagcaccctctcattgtctttaatgatcgctttgacatcttcgacagatacgtgctcagcttttgcgatggcgtctacagacatgccgttttgatattttgaaagaatctgcttcgcaatatgctggctgattccggcattcggtctgcggacgaccacatttgaatcgaggagctcttcctcaagcacggtcatcttctttttcagtttatagatttcctgcatggcggacagctgaagggtttccaactcctgttcaacttccttgatcggttctctttgaaaatatgagaatgcaatcagcgcaatactgacaacgagcagcgcaatgatagcaatttccacgttcatcaccttcaattctaattttctccttcttttttataccataaaaacgcttgcttcaaaaggagttaatgcaaaaaataaaaattttgtcgaagaattttattttcgttgcgcctgcggggccatttccaataggatagatacataacaaggcttaacgggagggcgcgcggtgaaaaggacaatcatcgggaaaaaaccttttcaacatagtattcgaggcgattcttcgttttgtaacgatattttaaaaataacttcgccggatcatgaaaccgttcggctgagctgggaaatctcagaggctgcgctttcagcggctgaagcggtgctgtttgaaaatattagagacgtcgaaaagcaaatccttctcttttgcgtaaaaaacggagagcgcagcgcacggacgatccataccggtgcatttaaaggggaggcctcggttttccccgctgcaggaaacgctttctacaaagcggaataccggatatacaattcgctcaacatgtcactggccgttctctcatccgactgcttctaccttggggaaaacggaatccattcaaacagcagctgttttcagcatcaagacaatcagcaggattggacgactcaattttccgcatatacgagatattctttaatagaaggaaaggagcggccccgttgatcaacgtattgctgctgtcgctggaaaatcccctttcatcgaagagcggagcggggcgctatgtgaaaagccaccttgaactattgcggaacgaagtcagctttaccgtctgcacgacggctgccgggcaaaacagcaatggatgggaaacgctggagattccgcttgatttaaaagcgttcgcttcttttgaagaggcggtagccgccatgaattttcagatgatcaaaatcgtgctggagcatagaggacaatttgatttcgtccatgcaaacgatggtgtcaccgcgcctgccgccgtttatctcagcgaggtgctggcggtgccgctgatttccacggtgcacggccttgaaagcggccgaaaaaaggcagcagacggatatgtccacccatacagggcaatcctcgaacggcttctggctgaaaaaagcgatcaaatcctcgtgctgagcagcatgatgaagtcagacatgcaaaaggcgttttcgctttcttttgagcaaatccgggtcattccacatccgtgcataaaaagccgcacggtgaaaaaacgaatgaaaagcgcgccctactttttttcctacggaagatttgttccggaaaaagggtttatcgaattgctgcacgtctttcagaagctacgcagccggcgtcctgatcttgaacttgtcattgccggggaagggccgcttcaaagcgggatcgagaccatagcaaaagaattgggcattaaggacagtgtgaccattcttcctttcctttgtgaagaggaaagagagagctggctggcattttgtgaaatggctgtttttccaagttcttatgagccgttcggcattgctgttcaagaaagcatggccgccggcgctgccgtcgctgccggaatcaacgggggctggaacgatttcgttatcgatcgggtgaccggctttcgaattgattttagtgatccgcataaggctgcaaatgcgctcgcagaaattgtcggcaataaggagcagctgctcaaggtcggacaaacggcaaaggcttatatatttgatttgcatgatcctggatatgtaaaaaatatgtttttgcatcatgtatatcatacgtctttttaacaaaccgtgataaactaaaaaaaacgcctggcattcctgcatcataagtggtattatagataagtctgaacagaaatgatatatagtttggagggaaaaataaatgcgcgttaatattactttagcttgcactgaatgcggcgagcgtaactatatttctacaaagaacaagcgtaacaatccagatcgcgttgaattcaaaaagtattgcccacgtgacaaaaaatcaacattacaccgcgaaacaaagtaagcagcagggattttcctgctgtttttctgtttttaagggggaaagagatgtgaagcgttctttacgaagcgaggtcagaaagaggctggctaacatgccggaacaggagtttcacctaaaggcggaagcgattcaccggaagcttttccaatcaaaacagtggaaaaaagcgtctgttattgcccttacggtatccagaaatcgcgaagtaccgacaaaaccgattatcgaacaggcccggcttgaaggaaaaacggtgtgcattccgaaatgtatgcctgaaacaaaaaagatgcactttcgcagctatcaggatgaaagcgatcttgaagtcgtgtattttggcctgcaggaaccgatcgtacacaaaaccgagcggatggaacccgaagacatcgacttcatccttgtgccgggaatttgctatgaccggagaggatacagaatcggctatggaggcggctattatgacagatacctggccggctttacaaaagataccgcgtcgcttgccttcgagtgccaagtgatcggtcatgttccaaatgagccgcacgacatcccggtcaagcaggttttgaccgaagacgccgtttacaactgcctcgacactgctgaataattattaaaaaatgagacacgatacggttataggttataggagggatcatatgagaaaagttacgtttattgtagtaggcgtcattgcagcccttgtattttttcaaaaccgttatcgtgttatcaatttcattcttggtcaaaaccaaatccgccactatttcatccatttgatgatgagaattccgttttttcgcaataagtttatccagcaggcattctgaatcccgtttgaaaacgggattttttaaagctcttaaaagacgcagagtgtcgcgtttcctgttataatgaacaaaaacaattgtggagcgtcggtatgtattcaatcgattatttgtattggaatttcatcgggaaccttttagacagggattttgagcttgtgcaggcacctgcttcattcggagaagcctggcttgaagcgagggggagcgcgccgtatgatttggttcgcgttttccggaaggatatcgacttcagacaggatctcgtccgcgacctggaatctctttatgaaagggcggagcgcctgagagcagcatcaggtcagcgaaagctctcgatattgaatgtctatttgtcgcaggaagcgcctgtagatgagtgggaagatgttgtcggtcatccggtcgcagataagcggatcagcatcgtgccggtttttattgatcacgcttcggctgaagaaggattacgcaaactcgccgtggctttaaacatggagccggatgagctgacaggccaaatgcaggatgccggatacgaaaatgtggaagagaagagagccgaagtattggcagcggctaaagcaagagaagaagaaaggcggcgggaagcggctgtatttgagaaaggcaaaccgatgtttacctggattttcgcagtgcttcaagtcttcatgtttctgcttctggaaatgtcgggcggcagccagaataccgaaacgctcgtccggttcggggcgaaggaaaacagcctcctgttagccggggaatggtggcggctagtcacgccgatcgttcttcatatcggattggtccatctcatgtttaatacatttgcattattgtctgttggagccgcagcagaaagggtgtttggatcattccgctttcttgtcatatacatatcagccgggatttttggatcgatcggcagctttctgttcagtccgtatccgtctgcaggggcttcgggagccatcttcggttgcttgggagcccttttgtacctggctttttcaaaccggaaagcttttttaaaaacgatcggaacaaatatcattgtgatcatcattctgaacctcggcctcggtttcaccatttcaaatgttgacaatgctggccatatcggcggattgatcggcggtctcctgacggccttggcggtcggaatccccggaaaaaaaaggccgctccagcggctggcaggctgggtcctcatctttgtcatcggaggaggggccctgtactttgggacacattcggctccggtgcaggaaaatgccatgctgcatcaggcggcgaaatggtatgaagagggagagtatgaaaaagtaaaggatgctttgaaggaagcgggctcaaaaccggacgcttccagcgacactttaaggctgctcgcttattccgaaattcggctcggcgagtatgaaaacgccgagaaaaggtttgaggccgtcgttgaaaaagatccatcggaccacgcctctctctatagtcttgcctggctttatacccaaagaggcgagcttgccaaagccgagcagtccattgaaagagcgttggcagaaaagcctgatgaagagatgtataaaaagcttcgggacgaaataaagaaagaaagcgcccggtaatcaagtatgaaaagcttccgttatgttaaaaatggtctttagaacagactcatttgacgggagcttttaatatacaatgaaaaaaaagcatgcggtccaaaaaaatttagcgaaaaatgttgaatatttaaatgaaaagcttggtgtcgacaaaagcttcgacatgatccggcttgatgtcgtttatgctgatagagacatgtcgctttatcttgtcgacggctttgtaaaagatgatattatgcatcatttgcttaaaaatctctcaaggctcacacctgaaaatctggaagacgatccgcttgaaaagctgatcaaaacgcatatcccatacatcgaaattgatacggaagatgacctcgacaaagcagccgaccaggtgctgtccgggccggctgtcctccttgctgacggagttgaccatgcgattattatcgatgcgcggacgtatccggcaagaaatccggaggaacccgacaatgaacgcgttgtcaggggttcaagagacggcttcgtcgaaacgatcgtgtttaacaccgcactgacgagacgaagaatccgcgaccgttccctcagaatggagttcctgcaggtcggcagaagaagcaaaacggatgtcgtcatctgttatttggaagatatcgccgacttggaaagtgtaaaaaagctgaaacaatcgcttgaagcgatcgacacggatgctttgacaatggcggaaaagacgctggaagaatacatcggcggccgtcattggaacccttatccgacggtccgctatacagaaagacctgatactgcggccgttcatttgtacgaagggcacattctcgtctttgtggacggctcgccaagcgcgctgattacccctgttactttttggcaccatctgcagcatgccgaagagtacagaaacaaacctcttgcgggtgcttatttgcgaatagtccgttttatatctgtcttggcatcgatctttttgctgccgctgtggtttctgctttccgtccatcccgatcttttgccggacgcccttgaatatatagggcctgaaaaaaaaggagcccttccgctgcttgcgcaattcatcattattgaaatcggcgtcgacatgatgcggatggctgcaatccacaccccgtcgtctcttgctacggctctcggactcgtagctgctttaatgatcggcgaagtggcggtgcaggtcgggcttttctcgcatgaagtcgtcttgtatctcgctgtcgcagccatcggcacgtttgctacgccgagctatgagctgagcatagcgaacaggcttgcaagaatcgttctcctgatcgccgcaggtgcattcggaccgatcggctttgtcattgcgatattctgctgggtgatttatctcgtcagaatgaagtcgtttcatgtgccgtatttatggccgtttattccttttgactacagagccttccgcgatatcgcaattcgcacgccgatgccgctgaaaaacagaagacccgtatttttggatccccaggatcccgaccgctgaatgtctgttttccggcaggaaaacaggctttttttttgcttgacgccggacagctttatgaatactctaatgttagacctttaaagaatggtgaaatcagatgaaaacagcctatgatgtacagcttttgctgaagcagtttggatgttatgtttactttggagatcgcgagcttgaacttgaatacatgatggacgaactgaaggaaatgtttctttcaaatttgatagaaaaagaacaatgggttcaaggtgtttcaattttgcagaatgaactcacaaatataaagagaaaataaaacagggattagagggggatcagtatgaatgacagctggctggtcggggtcgaccttggaggaacaacagtaaaactcgcttttgtaagcgcttatggcgaaatcctgcacaagtgggaaatcccgaccgataaatcagggaaaacggttacggtaagcatcgcgaaagccatcgacagcaaattgaacgagctcggcaaaccgaagcacatcttaaaatggatcggcatgggcgctcccggacccgtcaatacggagaccggcatcgtttataaaacgacgaatatgggctgggaaaactacccgttgaaagaccatctggaagcagagacagggatagctgcggtcattgaaaatgacgcgaacatcgcagctctcggcgaaatgtggaagggagcgggagacggcgcgaaggatttgattcttgttacattgggaacgggcgttggaggcggcattattgtaaacggggaaatcgtccgcgggcaaaacggagcaggcggtgaaatcggccacatctgttctgttccagaaggcggagcgccgtgcaactgcggaaaaagcggctgtatcgaaacgatcgcttcggctaccggcatcgtcaggattgccaaagaaaaaatagaatctgaccatcgagatacaagcttgcgtgaatgtctggacataacggcgcgcgacatctttgaagccgccagaaaaaacgatcctgttgccggcgaagtcgtcgattatgtggcgggtcatttaggaatggtcctcgctaacttggcgagctcgcttaatccttcaaagatcgtaatcggcggaggcgtgtcaaaagcgggagaaatcctgcgctccaaagttgaacaatctttcaagcgctttgtattcccgcgggccggcgaggcggctgagatcgtaatcgcttcacttggaaacgacgcaggcgtgatcggcggtgcatggatcgcaaaaaaccaatggctgaaaagccaggcgcagcctgttttataaagcattttcggaccgctttgcagcattgttaacacttttaagccaatgtgaaaaatgattgatttttttgtacagacaggttaagatatgatttagtaattttagcgatttttctaaaataaacaatatgtggaaatgccgtttgcagaaacatgcgtcttgctgcatagggaggtttggaatgcgaaagtcatttttttcaaaaatttcgtttttgttaatcgcgacattgctgatgtggctgaaaacgtatgtcgtctacaaaacaagcttcaacattaaaattgaaaacttcatgcaagagtttatattgttcatcaatcctttaagctttttgctgtttatattcggaatcggcctgttttttaaagaaaaaaacagaaaccggtttattatcggggcaagcatcgtcctgacgtttgtcttgcttgccaacatgattttctaccgtttttacaacgactttttaaccattcctgttttgttccagacgaataatatgggcgatttgggaagcagcatcaactctttgtttatgccggccgatttgcttctcatcgttgatattgccattttaatttggctgtacaagcgccagcctgccaaaacaggcggaaaggcgacaagaaaggagcgcgcggcttactatctatttgtcgctgccgttttcttttttaatttagggatttctgaaacagaaagaccgcagcttttgacaagatcgtttgatagggaagttcttgtgaaaaacatcagcctttacaacttccatatctatgacgggctgatccagtcgaagcagtctgcgcagcgtgcgctggccgacagcaacagcctcacggagattgaaaactatgtcaacgcaaaccgcacggacaccaacaaggatctggccgggatcgccaaaggacggaatgtgatcctcgtttctctggaatccacccaaagctttgtcgtaaaccaaaagttaaacggcaaagagattacgccgtatttaaatgacctgattaagaaaagctacagcttcgagaatttctatcatcagacaggccaaggcaaaacggctgattccgaattcattgtcgacaactctctctaccctcttggaaggggagcggtcttctttacaaatgcaggaaacgaatatacggcaatgcctgaaatattgaagaaccacggctactattcctcgattttccatgcgaacaacaaaagcttctggaatcgggatattatgtacgaaacgtttaaatacgataagttttacgatatcaaatcctatgatgtaaacgaagaaaattcagttggatggggattgaaagataaggaatttttcgaacaaacatcagagctgatgaaagaaatgcctcagcctttttatacccgtctgatcacgctgacaaaccattttccgtttgagcttgatgaggaagataaactgatcaatgaattcgattcaaaaagccgtacgttaaacagatatttcccgaccgtccgctatcaggatgaagcgcttaaacgtttcattgaaaagctgaaagaagacggcctctacgataattctgttatcgttttatacggtgaccattacgggatttccgaaaaccataacgaagcgatgagccaattcctcggcagagaagtaaccccttttgaggaagtgcagcttcaaagagtcccgcttgtgatccacattccgggagtgacggataaagagccgaaaaccattgacacggtcggcggccaaatcgacattcgaccgactatactgaatcttctcggaatcgattcaagcgatcagatccagtttggaaacgacctgtttgccaaagacaaaacggagttcacagtgctccgcgacggcagctttattacgaaagacaaagtatacacagacggcatatgctatgataaatcgacaggcgagccgtctaaagataaaaaaggctgtgagccgtacattgaaaaagccaaacaggagctttcatactcagatcaaatcatttacggcgacttgctgaggttttatgacagcgagcgcttaaaaaagcaatctgactccaagccaaaagacgagtaagcttctttttaggcggagaaagctgatgcagcaggccggatatcgttccggcctgtttttaatgacaagaggccgtcataaaaatcatgatcaaaccgatgccggttatgatataattgataatgattctctttatcgggtgatcaaacaggaaagaaggtatgaagagtgaatattaaaggtaagacgatcgcggcagcgtgttttgtactattattgatcgcagcattgacagcatgcggcaatcaaacagagagcaaagattcttcttctaaatcaaaaagcgaagaaacgattacatacaaggctgaaaacggaacggttaaagtgccgaagcatccgaagcgggtggttgtcatggctgacgattatttcggctatttcaagacactcggtctcaatgtagtgggcgcccctgacagggttttcaagaatccttatttcaaggggaaaaccgatggtgtgacaaacataggtgaaggaaattctgctgaaaaggttattcaattaaaaccggacttgattgtcgtatggacgacccaaggcgctgatatcgaaaagctggaaaaaatcgctccgacggtcgcgttgaaatatgacagtctgaatagcactgaacggctgaaggatttcgcaaaaatgacaggcactgaagatcaagcggagaaatggctggctgaatgggacaaaaaagttgcggcggccaaatcaaaagttcaaaaagctgtcgggaacaaaacggtttccattatgcaaactaacggtaaagaaatctttgtattcggcgatcaattcggaaggggaggaagcattgtttaccaagatctcggcttaaaggcgacaaagctgacaaaggaaaaagcaatcgacgaaggcccgggctacacgagcatttccttagaaaagctgcctgatttcgctggagattatatatttataggaccttgggaatcaagcggagacgacagcgccgtgcttaatacatccatttggaagaaccttggggcggtcaaaaaccaacatgtctataaaatcgaccctgtcggcttctatttttccgatccgatttcattagagggccagctcgaatttattacagaaaacttaacaaaatagaagaacttccgccttgtcaggcggaagttttttttgcgcgcgaaaccggggtgaaccctcattgaaaaagcgattttcaagtgcaagccgggagagtttttaaacgagcattcctcatatgctattgtgggagggatcattgatggcattcatcaacatcaaaccggagttaaagcagaatatggaaagactgtctgacattctgaacatacccgaaccgcttttaatcagtgcaaatgcaaatgtatccgcggacgaactttattttccgggagtatcttttcatgcaggaaaaaacgttcaagcagcagaaacatatgaacagctgcaattattggcgaatcaatacacgtttgaagatgaacagtggctgacaaaaacagccgtttacgattcagcagaactgaaaaaggaaattggcagattgacggaatgctttccgtttgttacttcccgtatcatcggccgctcaagcatgggccagcctatatatgaactgctccttggagctgaaaatgccggaaaaagaacgcatatgaatgcctcttttcatgccaatgaatggatcaccacttctgttttgatgaaatggctcaaagaatactgttatcatttatgtacaggccagaccgctttaggtttttcgccgctcgatattttttcatcaacaaagctttccgtcgtgccgatcgttaatcccgacggtgttgaccttgtacttaacggccccggtcatcttgggatcgcgagagaagcgctggatgagatgaacgagcatcagccggatttccgggaatggaaagccaatataaacggagtggatttaaataatcagtttccgtctttctgggagatcgaaaaacaaagaaaaccgcctaaatccccttcctacagagactaccccggagatgaaccgctgacagaaccggaagcggcagcgatgagggatttaatcgcaaacgagccgcctgaccggcttgtggcgcttcacacacagggggaggaaatttattggggatacaagggattggagcctcctgaatcagctgatgtgatccaaacatttgagcgcctgagcggttataagggcgtcagatatatagacagctatgcaggatttagagattggtttattcattattacggaagagaaggatatactgttgaacttggcaaaggaaaaaatcctttaccgctgaaacaatttgacgatatatattgtaaaagcagaggaatactttgggcatcctgtttttttgaaagctgaaacttttcacggtgaaaatcgtaaattagacagccaaacatttatggagggagaatggccggtttgagagtttcattattgattattgccgctctgatggccgtggctgcggctggttgcacgccgcagcatcaagaaggatcaaaaagcgttcatcatgaggagccggaagggaaaagagaaagcggtgcagcagtaaaagataaaaaagtgatagcgctgaaggaccggcactttgatgagacggcaggatggcttgataatgaaaccgttatatacaccgcaaccgatccggtcggaggaagtgaaatcaaatcatatgatatatttaaagggacgggcaaaacgatctacaagacagatgacaggctgatagcgtcggaagtcaacagtgaaaaaggcatgattcttatccaaaccgccggaaacggctctgaaatgaagttaactttgcttaatttacaggggaaacagctgtttgcaaaaaaatttcgcacgcatgagttgcaagtggactggaatcgattcgatccttctcttttatatgtcacaacattcacgaaagactggaattatgaatcaagcctaattgatgcaaaagaagagcaaacggaaaaaaacatcgcacaggccgcctttattcattggacttccgccgacacttttgaatatatcaaatggaatgaacgggaccgggaaaagccggctcctgtttattcctacagcacagcggacggacgggaaaagaagctcgcaggcgatgccgtacttctcgatattgtaggcgatatgcggctcatcgtaacgccttcatccgatcagcgccagggcacctacatattttcagacgtttcttcatcggaaaagaaaatctctttcaagttgccgctgttctcggaatatggcagcctgtcaccgatggaatacggttatgaccctcggcatgagctgttttatacgtatcagccaaatgagtcgggctccttgtatgatctgatttccgtcaacctcaaatcaggcaagcgggaagtcattcgtgaaaaagtggaaatgcttccgattaccttatctcctgacggggattatgcattgtacggctatactcaggatcaaatcatttcactcaactcaaaaacagcagcgccccttgtgaccaaagaatagaaaggagaatggacagtggccatagcagacgtcaccatcataccgatcggtaccgagactccgagcgtaagcgcgtatgtagcggagattcaaaccattttggaaggatttaaaaaagagggcaaaatcaattatcagctgacaccgatgaatactttgattgaaggggaactaagcgatttatttcaggtgattcagacgattcacgaagcgcctttccaaaaaggcatccacagagtagcgacaaatatcaggattgacgaccgccgtgataagaaaacgacgatggagggcaagcttgcaagcgttcagcgtcatttcagtcaataagaaagacagccttgttccgaaataacggaataaggctgtctttgtctaaaggcatcgggtttagtggactgtcggatacccgctgttaataattgtcatgacggtaaaccatccgaacactaaaaaagccgccccgccgaacaagatgccaagaacgttgatttgtttaagagaacgaagaaccccaagagcagataatatcgtgactagaccgaaaatgatcacgagcaacatcaatataaacccccttcgcttggatcccctgcagtatatttccaattttattttaaccgttttcatcaaatttgtcgaggacaacatgattcattgaaagtttctcacaaaaccttcataatggaacaaagaaagatgaatctgaggtgaaaataatgaaatggagaagaatgcctttagggcctatccagacgaacgcttatattttatccaatgatgacggcacctgcttaatatttgatccaggcagcgaatcagggaagctgaatgcatacataaaagaaaacgggctgaaacctcttgccgtattgctcactcacgctcattttgatcatatcggagctgtggacaatgtcagaaaagaatggaacattcctgtatacgtgcataaaaatgaagctgaatggctgactgatccttcattaaacggttcagcgctgcttacagggcagacgatcacagcagaaaaagcagatcatctgatcgaagaagagggagaccttaaaatcggcccttttacgctccgcatgctctttacgcctgggcattctccgggcagcgtctcgtattatgccgaagaggaaaacctgatcgtttccggcgatgttttgtttaaaggagggatcgggcgtacagacctgccggggggcaatcaaaaggtgctgatggacagtattcatcaaaaactgctgacacttccggaagagacgcttgtgttaagcgggcacggccccgagacggacattgcaacagaacaggaacaaaacccgttcatcaacggatttactttgtaaaacataaaaaaagacgatccatctggatcgtctttttttaatggcctccctgtccgggaaccataatgaacacagaataatatgtaaatgcggcaaaaaagattgtcaagtaagcaccgaaaatataaatgtacatccgctcggtcaagttgagatacgataagaacacaaaaaatacagtttgaccgaagaacagcagtgatgcatctttcatatttcctaaataaaacatgaccgcaaagatacctgtccagaaacctaacacacggaacatgcgattcatttatatccctcccaaaaagcccctttgatttcattataaatcaatttatcttaaaatgtaaacattttcattttgggaaaaacaattcattttttacaattttgtgataaggaatttaaaaaataacctgtcacgtgtttaaacggaaaacatcacgggtactgaaacatacaaagacaaagtcagtacatttaaggaggaatcattcatggaagagctgaccttttattcatacccgagctgcacatcatgccgaaaaacgaaacattggctgaaagcgaaccaggttgattttacagaacggcatcttttcagggaaacgccgaaccaggatgaattgaaacatattttgtctctcacgaccgaaggaatcgatgaaatattggcgacaagaagccaggcatttaaagagttaaatcttgatattgaagaattaacggtaagcgaagtgctggaattgttaattcaaaagccaaagctgctgagacgcccgattatcgtaaacggcgataagctggtcgtcggatacaatcccggcgaactcttaaaattaaaaaaacacaccttacaccgttctgtttcctgaaaaaaacgaagattgctgacatattgcatgttcagcatatcttcgttttttcgcctgtgtaactgggctagctggattcgaaccagcgcgtcacggagtcaaagtccgttgccttaccgcttggctatagcccaatgcgcttacatatagtgttgacaatcgatttcgttttatacatagcattcaaatcagttggtcattaagcgattgatttaaagggaaaacaatgaggaggattgacatggaaaacaagcatgcagccctttatgagtatctggtcaaacaggcggacagaatcacagatgaatggctgtcccgaacagcgtctgaaaaagaaaaaacggcacagcaatacaaggactttatactggctgtttcaaaggtatttgccaaagatgaacaggcgctatgctggaataaagcttccgggtgcgccaaggaaattgcctacgacagggctgtcagccaaattccggttaccgaaagcataaatggttttaaagtgtgccgtgaacttttaatagatgagatcgagcaattttcagatgaacatgcaccagacagttcgaaaaaagatttttttatctggaataaacagcttcacttaatgatggatgaggtcatagagcagtttattcttgaatatgagcatacgacaaagagccaattgaaggcgcagaccgagatgattcgcgaactgagcgcaccggtcataccggtatcagagcacatcggtgtgctgccgctcattggtgaaattgatactcacagggcaacggtgatcattgaatctgcgctcacgcagtgtgctgagcttcatctctcgcatctttttattgatatttccggtgttcctgttgtcgatacgatggtcgcccatcagttgttcaaagtcgtagacagcacaaagctgcttggcgttgaaacggttctttcgggtttgagaccggagattgcccaaacagttgtgaagctcggcatggatttttcacatattaaaacagaacagagtcttgctaaggcgctttgcaataaaggcttctgcatccatgaagacggcaaggccgaagagcaggtttaaatttctatttcagcggcttgaagtcgaataaaatagtcaaatcggtattcggagattccgtttttgttacgtattcggcttgatttgcgctttttatggatttgatgcttccgatggttttcgtataaactgcgcttagaaaggaggcgcaatggtttgtacacgatcgaatcattaagcggaagattaattgacgaggcatatagaatgaaggcgtcagacattcatattgttcccggtgaaaaagaggcggtggtacgcttcaggattgatgacgaactgtttcaaaaagacggattaacgagaaatgagtgctctagactcatttctcactttaaatttctttcttcgatggacattggcgagagacggctgccgcaaagcggggctttaactctttatatcaaccgtgagcccgttcatttaaggatgtccactctgcccaccatccatgatgaaagcttggtcatcaggcttcttcccaagatgagcagcaagccgctcacaaagctctcattgttcccgagtgcaacattcaagctgctgtcttttctgaagcattcccacggattaatgcttttcaccggcccgacaggctcgggaaaaacgacaacactctattctttaattgactacgccaagcggcattttaagcgaaatatcattacgttggaagacccggtcgaatcaagaagcgaaaacattttgcaagtacaagtgaacgaaaaagcgggcatgacttattctgcggggttgaaggcggtgctgcgccacgatccggacatgatcatcctaggggaaattcgcgatgccgaaacagcccaaatcgcagtcagggcagctttgacgggacaccttgttctatcgagcatgcatgcgaaaaatgctaaaggtgcgatatacaggctgctcgagctcggcgttgatatgacagaaattgaacaaacattggtcgcagtcagcgcccagcgtcttgtcgatatcgtctgtccgttttgcggcgacagctgcactttgtattgcagattgtcgagaccagttagaagagcaagcgtctttgaacttttgtacggaaaaagccttaatctctgcatcgaagaagcaaaaggcagatgcggtggcatcaaaacagacaccttaaaaatgctgatccgcaagggaatagcactcggatatctgccgtcgaaaacttatgaacgctggataggccatgaagattaaaatgaagtggcctgtccgggaacaggcggaccttctgaaaaaactaggagacatgatgcagagtggctatacgattttggatgctttaagtatgctgaaattgcaattgaatgaaagacgaagagcggatctgacatttgcgatggagaagctgacagaagggtgtcctgtgtttcaagttcttgaaatgatttcctttcacaaggatgctgtcaccattgtttactttgccgaacagcacgggaatttgccatttgcctttaggcagagcggagagctgcttcaccgcaagatcgctcaaagcgaaaaattaaagaaagccgccagataccccttgtttttagttttaacggtctgcgtcatcatctctattatgaaatcagcaatagttccgcaattttccgccatctatgaatcgatgaacgttgaaacgtcttttgcaacgactctcatcttttatgttttcgatcacttttatctttttttcgcgggactgccgctggttgccgcagctctatccctctattatctgtgttcattccgccataaacctccagaagacaaaatggcctttctcattacaattcccttgctgggccaaaccttcaaactattcaacagctattttttatcgctccagctgagcaatcttttgcaagcgggtctgtctgtatatgacagtttaaaagcatttgaaagccagccgtttttacgatttcataaaaatgaagcgaagcgcttgatcgagcggctgaaacagggggagagtctggagcagatgctggccggacatccgttttatgaaaatgatttagcaaaggctgttgcacacggccaactaaatgggcacttatacagagagctgtattcatatagtcagtttttgattgagcggcttgaaagaaaggccgaaaaatggacaggcctgatccagccattgatttacgggctaaccgcggcgatgatattaattctttatttgtccatgcttttgccaatgtatcaaatgatgaaccagctataaggaggacggaactgtgaatgaaaagggatttacactgatagaaatgttagtcgtcatgctcgttatctccatcctgctgttgatcaccattccgaatgtgaccaagcataaccaaagcatccaaaagaaaggatgcgaaggattaatcaatatggttcaagcgcagatcacggcctatcagatggatcatgacgggaaaacgccgaacagggcggagcttgaatctgaaggttacataaaaaagaacttaaagtgtccgaatgggaaagcaattaaaatttcaaacggcaaagcacaggctgattgacggttatgaatcaaaaaggatttacgcttttggaaagtttaactgtattgatgatcggttctattatgttctctcttctctttgctctactgcctcccatttatgaaaaaagaatcgttcagcactttgtctcacagcttgaagaggatttgctttacgctcagcagacggctctcgtccgccatacgacggttaaggtgcagtttgactttgccggctgccgctatatcatgaagcattcggacgaaggctcatcgcctgaactggtcaggacatacagctgcaatatcgcaatcaaaaagtcgacgctcaaaccaattcttacttttaatccaagcggtgttccgaatcaagggggaaagatcgtgatcgatacacagcatgcctcttttatactgacgatctatttaggaagcggaaagattaatgttcaaaaaaaataaaggctttacaacggttgaagctgtttccgcattcggcatatgggtaatgatcaccatgttattgatccctatgcttcatcagctgtcattgcagcgcgaagcgtccgaaaaagaagaagagacatatcgcatattggaggaaaagatcagccgctacacgctgaccggacggttccaggctaaagaagctgtgctttaccggaatacatcttactttattgaatggaaggagaagggagatgattatgaagtatgcatctctattaaaaaaagagacagccaaaggcactgtttcaccattttgcgggcaaaggggatatacccttcttaatataatgttttccttaatggtgcacatgttcgttgcaggtacgatggcctcgatatttcatctgtttttatccccggaaagaaacggttcggatattcacccccgtgaatggacgattactgccgagcaaatattgaaggagtctaggaattcgattgacataagaagtgccggtgatcatcagtcactagcgatgacaaaccgccaaggtgacaccgttcgctatgagcaatatcagacagttattcgaaaaagggtcaatggaaaaggtcatgtgcctctattacagcatgtcaaaaaaatgaggtttatgattgaaaatcacctgctgatccttgaagcgacaagtctaagcggcaaatcataccgcacgtctattccgctctatcatatgtaaaagggtgatcacgtgaaaaattcaaaaggattcatttatcccgctgctgttttcgcagctgtgatttgcatgctctgcgcgagtcactcagccgctttattaacgaatcagcgaacgtttgcacagcaaacaaaagaatttcacattcagcaaaaccttctccaaaatggaattctccatgccttgtcccatattcacgaagagacaaaagaaaaagttcaaaaacagcatggcttgatatcgtattctgtcagcccggctcatcagcagctcacacgagtccagattcaggtaacgacagcttccggcacagaaacaagcgctcaatttcaatatgatttaagaaatcaaaaaatcacgcagtggaaggaatattaaaaattgtgtgtccaaatcatgaagaatgtataaaaaaagattcggatgacaacacttcaactgacagaactccccaagaggtgatgcgatgaaaacgaacgattatgttaaatatatgacggaacagctcgtaaaatatatggacacgcctaagcaggaaagaaaagaaatgaaagaaaaacgtaaagaattaaagccgccgtccaggatatatcaatggttcggcattcttccccttggctgtatcatgttttttaaaaagcataaataaagacaagccgctttgcactgcaatgcggcttatttatattcttccacaacgacgactttgttaattttgtgtgtcgcaggttcaaatgaaattgtgacaaacactccgaaatttttatttccttcactcaatgtgacatggtattgtttgaccgcttcatcggcccgctttcgatcccatacttttttcgtgaggcgcacttctgcttccggatatctcttttttgcttcctcaaccgctttttcttcccacttagacatgcgggctgtttcgtaagctgccgcatgggcattgagcggcccaatgctagaaagcagtaaaaaagaacataatatgacatttttcagcacgggtcatcatcctttctatcctattttttccttgtcaacagtgtttatacaaaaattaagaagaaattgtgtacactataaagaactacaaacttttcaaaaagatgagaatttgagaggttttttgaggaattaaacgaaaatgttctttagaacgaacttaatcgacttttttgacagttttcaaacggcacacttgttctttatactctaactataaagttctttaaaacgaacggaaacaaaagccattacatactcgctaggagggtagtcatgttccgattatctcgaactaggagatgccgaaaaagagccggaaaaaacattatcgtttttcaaacgctgctgatcatatacctgttaattggattggggagtcagctgtcacagcatacaaacgcatcatttcatgatgtggaaacatacagcatgacaatgaaagcggcctcaacttttcctcaagatgagaagcagtgggacgggagcgatttgaagcttcaaaagcagacgaagacgaaaggaacggtctgtgcaccgctgacattgtttgcagaatataaaaaccgcggcagtcaaatcgccgactctgaatggaagtgggagcttcataaactcggtcattccaaaaagccgctagaggacgggactgtgatcgataaaggcgtgttcaaaaaagaagccgaaagcagcatctaccggatagagtcaaagcgggcagcaaaaggagggctatacgcttttaaattgatcagacctgaaggccatccagatgttaaaaagggcaaacctttcatttggtcaaatgtaatggagcttcaagactgcaatgaagaaacaccgaagcctcctaaaaaagcttcagcaaaaccaaagcaaactgaacagactcaaacaacgcaaaagtctgaacaggatatagaggaaacaccaaaggacagtgaatccgtagataaagaaaatagaaaagaagataattcattagaaagcggggaagcgtcatgaaacatgtgatgaaatggatcagcaatttcttatatgtgattattttcacaatcatcatcgccgcggtcatcgtcgtgatttcgacaaagtcgtccggcggggagccgcagctcttcggctatcaattgaaaacggttttatccggatcgatggagccggagtttaaaacaggttctgtgattgccgttcaaaaagttgaaaatcccgggtctttgaaaaagggagatatcattacattcatgcaagacgaaaacaccatggttacccaccgaattatcggtataacaaaaaataaatcaaatctcatgttcaagacaaagggtgacaataaccaaaaccctgattccgatccggtactggcggaaaatgttgtcgctaagtattcgggcattacggttccgtatgccgggtatttgctggactttgcaagtaaaccgatcggcacagccattttgctgatcgtgccgggactcttgttgattctttatgcagtaattactgtatccgcggctttaagagagattgaccaaaaagctaaagcaattgaagccgctggaaaagatcaatcagtttccatgtaatcttcgttggtcacctgaacattcaggtctccatatatacagattttcttaattataaaaggaggagttatcaatgggtacaaagaaaaaactaggattaggcgttgcgtctgctgcgcttggactggcattagtaggaggaggaacttgggctgcgtttaacgacatcgaaacaactcaagcaacttatgcagcaggtacgcttgacttaaatgcgaaagatacatctgcaagagtgaacttgtccaacttaaaaccaggcgacaaattcactaaagatttcgagttcaaaaatgacggatcacttgcgattaaagaagtgctgatgcaggttggctacagcaatttcgttgacggaaacgcgaaaaacggcggaaaaagcacagcggaagacttcctgaaacaatttaaagtcagcgttctgactgtcggagttgaaggcggtaacggctatcctaaaaacatcattttagatgaagccaacctttatgatctgtacaatatgtccgcgaaaaaagataagaacgcatatgaaaaagtgaagaaagccattgagccagagttcctgcatgacaatggcaaaatcaatgtagcgacaatcaacggaaaaactgcgcctgaatacgacggcattccgaaagacccatatgactttgataaagttcaattggtgattgagtttgtaaatgacaaaacaacagacgccagcggcagaatggtacagaacaaatatcaaggtgattctgtacagcttgacttctcattcgaagctactcaatggaacggcttgacaatcgacggcaaaaaacatgccgatgaaaaaggttatgtgaaagagaacgaaagagcgcacagtgaagataaataatggtgcaatttaaaaaacggatctttatgatccgtttttttatgttcatgaggaatcggcttattcagcgtaaaaaatgccaaagggagtaagatgtgtttcccttactccttttcctgtcttctcttccacttttgataatctaaaaattctcgaaattgttttttagaaacccctgatgccatagcgtcacgaactagattttcccattcactatctaattgaccatcgtattcggtttcatctttctcatcgagcagggtatgaaccgagacgtccagaacagcggagactttttctagaaattgaatggaggggtttgtttgcaagtttctttctattgaacttaaataagacttcgctaccccagccttttcagctagttcagatagtgagtagcctttttcttttcgatattgtttaatacgctggccaatcaatgtcatcaccttcctttcgatattatagcacattcagaaaggatttattgaatgacttctttcaattgatgtggaaggatttgaagacttctttcccaaattgagaaaaatacgtatttcctctggactaatgccttgttcaagagcgtgtttaatcaagtctgtccactcctcatccaattcttctttctcatttttatctttattcatacatttcccccccaaaatacttgattatgtatttcagacaaccatgttgtgataaacaaagataaacctcaaggctcaacacttttccaagcttgtccaaatgctgttacgaaagtttctcttttctctttagttctattataattccagctctctgaataaaaacaagaacgatgtcgaattggaaaaattatcctgaattttttttacgcagataaaataatcccccgttttgaactttaatatcgattttaggctcgtaaagcgtttggagggcctttttctcaatttcgtattcctccggtttttcttcagtatcctcgtaaaattggtttaagagtgccaggtcgttattccaacgtttcagggaagcttcagcccaatcaagcggttcgcttctggccgcctgttcgatatagcgctcaagccgttttatgccgctttccggcttaatcaacggcgacatcgtataacagtagtcagagatctgtgaggaaagctcgcgtgcttccatttgctcttgaaacgattcggtcagctggccgctgattaagtgaaggccaagggacagaagcttatcttttttcatgtcggactggtacgagatcgtcacattcatgccgagccaaggttccagagggatatgagccccttcggaacggattttctcataaaggcgaataaatttgccgtttttttgcactgcctggaaaatttgaaaaagtcttggtgatccaaaatgaataaactccccttcgatatcggaaggggcctcgtcttcattcgtgatcagcgtgattttcatcggattcggctctcctcccgtcttttcaagccagtgccagtaaaacggcctgttcatgatttgtttatcgacctcaaccgtcagctgcacggtcatgtggcctggacttttgtcggtgatcgtgcagccgtttgcggtgaaaaaacgttctaaaaacaggtagatttcttcctgacgcatttgaatttagcctcctatctgtgtatggtttgaaacgtcttcatttccgtaagagatgaaagaggttaagttttccattttgattttcatttcctcgtctgtcgcagagtaaaaaagaatatcgtggaggtgctcttcaaaattgccgacctcgatttttgttaaaatatcatccaagtctccgacgactttttcgaacaaatgaatcttttcataaagaagctttaaaatatgttcttctacggtatgctttgttgccatattgtaaatgtagacatcgcgttcctggccgagccggtgaatcctgccgattctttgttcgaggcgcatcgggttccacggaaggtcatagttgatgattttattgcaaaattgaaggttgattccttcgccgcctgcttcagtcgcgatcagaacttgcactttgcccctgaacaaatctttcatccagtctttctttcctcttttaaatccgcctctgaacggtacggaactgatgccgttctgctggaggaaccattgcagataaatctgcgtcgccctgtattcggtaaagatgatgactttgtcatcgagttcttgaatgagttcaacgactttcagcgcttttgaattttgtgcgacctcgttgaccttttcgatcaaatggtggatgacaggttcagagattaccggcgcttcgcggtcctttcggtcaagcatgtttttcagcgtcatatagacagcctccctgcttgaacagcattcgcgctccaatgtcatgattgagaacatgcttgatgaatgctgatgatttgtcttcagctttttaatctcgtcatacaaagcctgttctgtaggcgaaaaggaaataggcacggtttcgacatgacgctttgtccaggtgatgccggtatcatgccgcctgtttctgatcatgactttattgataagggacttcaagcgctcgtgtgcttcagctgaattgatctgttttgtataatctttgttgaagttgctttcatttcccaagtgtccgggttttagcagggagacgagattaaatatttcgtcgatcttgttttggatcggcgtcgccgtcagcatcagacagtattttttctttaagctgcggacaaactcgtaattttttgttttattgtttttcagtttgtgagcttcatcaataatcaccacatcgtactggatcgacaaaaccgtctctctgtgcggcgaccgctttgccgtgtcaagggaggagacgacaacatcgcattgctcccatacatagctttttttctgttcaacggccggaattaaaaacttttcccgaagttcctttacccattgcgagacgagcgaggcggggacaaggattaatattttcttggccagcccgcgaatcatgtattcttttaatatcagccccgcctcgactgttttgccgaggcccacttcatccgccaagatggcttttccgttcatctgttcgaccaccttccgggcgacttcgagctggtggggaagcggtgtgaagccggggaggtggtatggggcctgcaagccttcaaacgtcggaatcgcaagccttttctgcacttcacaggaaagctggtaaagctcccaattcgcccacgggccgtcttcatcaagatgctttttgaactgttccggccattcgttgtcgaaatgaatgtctggtctcatcgtcatgccgcctttctcttctgagattcaaatgttcttttttaaaaggaaatcttgcgtgaaaaaaacggattttactaagaaataaacaaaacacgaacgttcttattctgaaataataaattgttaatggttttttctgttgcccaatcgttgtgatgatggtaggatatttgtagatcatcagtaaaaaaatcgtaagctttatatagtatgtccatgaaaagaaatgaatatgagcgaatgacggcaaggggagagaccggcagagggaaacctaaaagcggcgccgaaggagcaagctggggaaacagtgaatctctcaggcaaaagaactcttgcttgacgcaactctggagagagtttgtatcatattatgttttgcaaaccaccaaaggggacatctttgcttttgatgcaaagtaaactttcaggtgccaggacagagagcctccaaactgacaaaggggcttctctgtccttttttgtgccgtataaagcggcgcagccatcctgttgatgttgaaatctttcttgttttctgatgattggcaaacttgtttttagtttgaaaagcgaagggggaagcagaatgcttaaacgtacgcctttatttgacctttataaggaatatggcgggaaaacgattgattttggcggctgggaactgccagtccaattttcttctattaaagaggagcacgaagccgtcaggacgaaagcggggctttttgacgtctcacacatgggagaggtcgaaatcacaggaacggacagccttccgttcttgcaaaagctgttgacaaacgatgtttcgacgctgaaagaaggcggcgcccagtatacggctatgtgctatgaagacggcggaacgatcgacgatctcctcgtctataaaaaagcggccaatgtctatatgctcgtcattaacgcagccaatatcgacaaggacgtcgattggatgaacaagcatataaagggtgacgtgtcggttcgaaacgtatctgacgagattgcgctccttgcccttcaagggccgaaggccgaagcaattttaaaacaggtcgcagatcatgaccttgcagaattaaagccgtttatgttccgggatgatgcagcggttggcagcgtgcaggcgcttgtgtccagaacgggatacacgggagaggacggctttgagatttactgccggaatgaagatgcagcctgcatttggaagctgctccttgaaacgggcaaggattcgggattggtgccgtgcggcctcggggctcgggatacgctgaggtttgaagcgaagctgccgctttacggacaggagctctcaaaagacattacgccgatcgaagccggcatcggatttgccgtcaaaacgaacaaagcctcggatttcatcggaaaagccgtcctggcaagccaaaaggaacatggagcggacagaaagctggttggccttgaaatgatcgataaaggcattccaagacacggatacgccgtctattatcaaggcgaacaagcaggcgaggtgacaaccggcacacagtcgccgactttaaagaaaaacgtcggcctcgcattgctgaaaaaagaagcctgcgccctcgacaccgtagttgaagtggagatcagaaataaacgtttgaaagccaaaatcgtgaaaaccccattttacaaacggcagccgtaagtttgccaagaccttgaaaggagactgaagatgaagcaccgttacctgccagctacagatcaggataaaaaggagatgcttgaggcaattggagtcgagagaatcgacgagctattctccgatatacccgaaagcgtcagatttaaaggggaataccaaattaaaaaggcaaagtccgagacggagcttacaaaagagctgacgaaactcgcggctaaaaataaagatacagtgacgtacgcctcttttttgggagcgggcgtatacgatcattaccagcccgtcatcgtggatcacgtgatttcgcggtcggaattttacacggcctacacaccgtatcagccagaaatttctcaaggggagctccaggcgattttcgaatttcaaacgatgatttgcgagctgacgggcatggatatcagcaactcgtcgatgtatgacggaggaacggcgttagccgaagcggcaatgcttgcttcaggacatacaaaaaagaaaaaaatcgtcgtttcggaaaccgtccatcccgaatcgcgcgaggttctaaaaacgtatgcgaaaggacagtacatcgatgtggtagaagtcccttccaaaaacggaacagcggatcttgaggctcttgatgaagccgtctgcgaagatacagcagcagtgatcgtccaatatcccaactttttcgggcgaattgagccgctgaaagacattaaaccgatcgcccataaagggaaaagcatgttcatcgtttccgccaatccgctggctctcgggcttttaacaccgcccggggcgttgggcgctgacatcgttgtcggagatgcccagccgttcggaatccctgctgctttcggcggtccgcactgcggattctttgccgtcacgaaaaaattgatgagaaaagtgcctggccgtctagtcggtcagacggaagatgaaaacgggaaaaggggattcgttctcaccctgcaggcccgcgagcagcatatcagacgggataaagcaacatcaaatatatgctccaaccaggcgctcaacgcgcttgctgcgtcagtcgccatgacggcgctcggaaaaaaaggcgtcaaggaaatcgcatggcagaacctgcaaaaagcggcttacgcaaaagaagcagctaaacgggccggtcttgaagtcgcgtttgaggggccgatgttcaacgagtttgtcatcagactcaatgaacctgtcgaaaaagcgaatgaacgcctgcttgagaaaaatattatcggaggctacgatctcggcgcttcatatccggatttaaaacggcacatgctgatcgccgtgacagagctcagaacaaaagaggaaatcgatacactcatgaatgaattgggggattgccatgaataatcaggatcaatcgcttatttttgaagtatcaaaagaagggcgggtcggctacagccttcctgagcttgacgtccctgaaacagatgtgacagacgtcattgacgaagcgtatatcagagacgaaccggcagatctccccgaagtgtccgagcttgatattatgcgccattatacggctttatctaggcgcaaccacggagtggattcgggattttatccgctcggttcgtgcacgatgaagtacaatccgaagattaacgaaaaaatcgcgagaatccctggattttctgcgatccatccgctccaggatgaagcgaccgtgcagggtgcgctggaacttttgtacgacttgagcgagcatttggaagagatcacaggaatggatgaggtcacccttcagccggctgccggcgcgcacggcgagtggaccgggctgatgatgatccgcgcgttccatgaggcaaacggcgatcataaaaggacgaaggttattgttcctgattcggcccacggtacaaatccggcgtctgcgactgttgccggatttgaaacggtcaccgtcaaatcgaatgacgacggccttgttgatctggaagatttaaagcgtgtcgtagacgaagaaactgccgcgttaatgctgaccaatccaaatacgctcggcctttttgaggaaaatattttagaaatggctgaaatcgtccatagtgccggaggaaagctgtactatgacggagcgaacctcaacgccgtactcagcaaagcaaggccgggtgacatgggattcgacgtcgtccatttgaatcttcacaaaacctttacgggaccgcacggaggcggaggacctgggtcaggtcctgtcggcgttaagaaggaattgataccgtatttgccgaagccggtgcttgtgaaaaaagacggacgctatacttttgaccatgaccgtccgcattcgatcggcagggtgaaaccttactacggaaacttcgggatcaatgtgagggcatatacgtacattcgttcaatggggccggacgggctcaaagaagtgacggaaaacgccgttttaaatgcgaattatatgatgagaaagcttgctccttactacgatctgccgtttgaccgacactccaagcacgaatttgtgctgtcgggaaggcgccagaaaaagctgggagtcagaacgcttgacattgcaaagcgccttttggacttcggcttccatccgccgaccatctatttcccgctcaatgtcgaggaatgcatcatgattgaaccgacagaaacagagtcgaaagaaacgctcgatgcgtttatcgatacgatgatccagatcgcaaaagaagcggaggaaacgcctgaagtcgttcaggaagcaccgcatacaaccgttgtgaaacgcatggatgaaacaaaagctgcgcggaagcccgtgctgcgctatgaaaaatgataagaaagccggcggatcgatttcgccggttttttttatgtgaaaaataatatctttatgtaagcgatttactgattgaatgagaaggatgtctcccgtattaaatagtaaattcatcaaatttaaaagtaaaaataaaaattactttgcaaaacgcgatagtttcaatgttttctagtgagataatggtttaattcaccttgaaagaagaggattatggagcatttagaaggattcgcaagggtggagagtgacaacgatgaatatgaaggtatgatacaaaatgatagcgaatatgccgtttgtctcatatgttacataaatgttacggtatattagattgcttcatacgggaggagaaatatgaattcagacgaaaagcgaatcaagataaaagtagaaaaagtgtccaaagtgtttggaaagaatacaaagaaagcaacgcagctgcttgccgatggcaaaaccaaaaaagaaattctgaaagaaaccggggcgaccgtcggggtgaaccaagcagattttagcgtgtatgaaggtgagatatttgtcatcatgggtctatcagggagcggtaaatcaaccttggtgcggcttttaaaccgtttgattgaaccgactgcaggacatgtgcacatagatggtgacatgataacaaatatgtccaaagaccagcttcgggaaatccgccgaaaaaaaatcagcatggtctttcaaaaattcgctctgtttccgcacaaaacaattcttgaaaacacagagtacggattggaactgcaaaaagtggataaaagaaaacgccggctaaaagctatggaatcattaaagcttgtcgggcttgaagggtatgaacagcaatatccggatcagctgagcggcgggatgcagcagcgcgtcgggcttgcccgcgcattgacgaacgatccggacattctgctgatggacgaagcgttcagcgcgcttgaccccctgattcgcaaggatatgcaggatgaactcctcgatttgcatgaatcagtaggaaaaacgattattttcatcacccatgatcttgatgaagcgctgagaatcggcgatcgaatcgcattgatgaaagacggaaacatcgttcaaatcggtacgccggaagagatcttaatgaacccgtcgaacgaatatgttgaaaaattcgttgaagatgtcgacttatctaaagtgctgacggccggccacattatgaaacgggctgaaaccgtgcgcgtagacaaagggccgcgcgttgcactgacgctgatgaaaaacctggggatctcctcgatttatgctgttgacaaacacaataggctcctcggctccgtcgatgctgaaacagcgaagaaagcagccgaaaaaagccagacgctggagagcgtcatctcaagagaaatcacaaccgtagaagagaatgttgtcctgacggatatctttgaattggtctcggatgccagcattccgattgctgtcgtcgatgaaaaacagcggatgaaagggatcatcgtcaaaggcgcattaatcggagcgcttgccggaaatgaccggtatattaatgctcatgaaccagcccatgaagctgttattcaggaggtgagataatgtttactttatcatcgcttccccgcattcctttagccgattggatcgatcagtttgttgactggctgacggtgtcgttcggcggtgtatttaacggaattgccagcggagtggaatcgtttgttgatgagattgtccaagggctgggttttgttccgccggttatgttgaccgttatttttgccgcgctcgtctggctgatcagcaaaagaggcattgcgctgtttactttaatcggattttttatcattgattatttaggatattgggacgccatgctccagacattggcgcttgtcgtcacatccgttctgatttctgtcattatcggcattccggtcggaatctggggctcccaaaagaaaacggttcggagagtcgttacgcccatccttgacttaatgcagacaatgccggcattcgtttatttacttccggccatcttctttttcaatatcggggttgtgccgggtgttgtcgcttccgttatctttgcgatgcctccgacaatccggatgacgatcttagggatccagcaggtgcctgaagatctgattgaagctacagaagcatttggttcaacgacaagccagcggctctttaaagttcagctgccgctcgcgacgaaaaccattctggccggtatcaatcaaagcatcatgcttgctttgtcaatggtcgttattgcatcaatggtaggcgcgcccggactcggagaagaagtttaccgggctgtgacccagctgcaaacgggtaccggtgtagaaaccggacttgcgattgttattattgcgatcgtacttgaccgggttacacaaaatataaaattgaaaaagagcagggggaatgcataatgtggaaaaagatagcgggaatcggcactgcagcggtactcacattgggtctggctgcctgcggaagcagcaataataatgaaaatgcgtcagtaggagatcaagtcaattataaaattaccggcattgatcctggagcgggcattatgaatgcgacggaccaggcgctcaaggactacgatctcagcaagtggactgtaacgtcaggatcaagctcagcaatgacagccgcattgaaaaaagcttatgacaaaaaagatccgatcatcattacgggctggacgccgcattggatgtttgcaaaatacgatctgaaatatttaaaagatcctaaaggttcctacggcgatgccgaagaaatccatactgttacgcgcaaaggattcaaggacgaccatccgggcgcaaacaagctgctcagccaattcagctggacagaggatgatatgggagaagtcatgcttgccgttcaggaaggcaaaaaaccggaagaagctgcagcagacttcgtgaaaaaacatcaagatctagttaagaaatggacaaaaggcgtcgataaagcggacggtgaaaaaattaagctcggctatgtggcatgggacagcgaaattgcgagcacgaatgtcatcgcaaaagttcttgaagacttaggatacaacgttacgctcagccaagtagaagcaggcccgatgtggactggcattgcaaatggaagcgtcgatgcttcacttgctgcatggctgccgcaaacgcataaaacatatgctgaaaaatacaaaggcaaatacgaagatatcggtactagcatgacaggcgtaaaaattggccttgtcgttccgacatatatgaaagatgtcaattcaatcgaagacttgaaaaaataacgaacaaagccggcgaacccatctcgccggcttatttttgccggaaagggataaccgctcatcacccgaatcctcccggatgcaaaaaaaacatcctaaaacgttaaaccgctttaggatgctggactcaactgaagccttccatagcagagacagcttcggttattaatttttcgttttaatttttccgccccattttttgaacccgcctttcaggttgtaaatctccttacagccgtgtttgcggagcgtttgggcggcccttccgcttctgacgttgttttggcagtacaggtaaaccggtttgtcaggccggatttcgctttttctttgcttaagctgtgaaagcggaatgtttctcgcacccaaaatgtggccgccttcatactcattcggctcgcgcacatcgatgagctgcgctttgcgatagcctgcccggaattcttcttctgtcaaggttttcataatgcgctgctgatagatgtatgaagcgaccgcgtagatgatgagcgcggcgcaaatcaagagaacgacaatgctgctggtagacaatctgatccgactcctttttgaattcgtcccgcctaagtaagtatgcgggagatttttaacgatatgttaagacaagtactattatagtaaagcctcagaaatctgtcatctgattcgccgaatttattttcaattttaagagggaatggtagacttattttataccaaagaaaaagagggtaggttatggaaaaagaaacatggcgttttatcgattcgggacgacgggatcccgcttttaatatggcgctcgacgaggcgctccttttttggcacagcgaaaataagattccgccgaccatccgcttttacggctggaatccgccaacgctttcagtcggctatttccaaaatatcgaaaaggaaatcaatctggatgccgtcaaaaaacacggtttgggctttgtgagaaggccgaccggaggaagaggcgtgcttcatgaccaagagctgacctacagcgtcattgtgtctgaagaacacccggaaatgccgaagacggtgacggaagcgtaccgcgtcatctctgaaggtattcttgaaggcttcagagagctggagcttgatgcgtatttcgccataccgagaacggaaaaagagaaacagagtctgaaaaacccgagatcttccgtctgctttgacgccccgtcgtggtacgagctcgttgtcgaaggcagaaaggtcgcaggaagcgcccagacaaggcagaaaggagtcattcttcagcacggttcgatccttcttgatctggatgaggacaagctctttgatttgtttatttacaaaaatgaccgcctcagagagcgcatgcagagaaacttcaaacaaaaagcggtcgccatcaatgagctgacgaaagaaaaagtcacgattgaagaagcgagcgaagcttttaaaaaagggtttgaaaaagggcttaacattcatttggagccttatgaactgacggaagaggaaacggaatttgtcgaagatctcgccaggacgaagtatgcgacagatgaatggaattatagaaggtaatcgggtgaaaacgttatcctgttgcttgttttttgcatgcacatagtgtaaacttgttatgatttgaataggtgtaatttggagggattcgatgacaacaccgagtatggaagattacatagaacaaatttatatgctgattgaagaaaaaggatatgcaagagtctcagatatagccgaagctctggccgtccatccctcctcggttacaaaaatggttcaaaaactcgataaagacgaatatttgatttatgaaaagtatcgcggcctcgtgctgacgcctaaaggaaagaaaataggcaagcgtttagtatacagacatgaattattggagcagtttttacgaatcattggtgttgacgaagagaaaatttatgatgatgttgaaggaatcgaacatcatttaagctggaacagcattgaccgtatcggagatcttgtgcagtattttgaagacgacagcaaaagaatcgacgatttgagaagcgtccaaaaaagaaacgaacaggaaaatcaataaaagccgccgggtaacggcggtttcagattgttgacaaatcccaaaacgactttttgttttgggattttgtcatccctttcagcgttattgaaaacccttgcagtctaggaaggccgagcatcggagcggagcgaatgttggaattcgtgagcaccgacgcgcaggcctgacaacgaatgcgagggtttgtcgacacgctgaagccgctgggtaacggcggtttttttcttttcgtatcattttttccggatgccgctcgttgtctcatggtcttttttttctgtccgtttcttaaaatgatgtagagccatcttttaagggggggagatcgcgatgtacatcgacggggttttttcaggcggcggcatgaaaggggttgcgcttgtgggagcatacgaagcgcttgaaaaacggggcttccgatttaaaaggctggccggaacgagcgccggttcgatcattgcctcatttatcgcggccggctatacaagcgcggagatccgccaaatgatggaggaattaaatgaaagcgagctccttgacccgaggttttcactcttgcctttgaaattgctgcaatgggcatcgatttattggcggctcggtttatataaaggagataaattggaaaactggatttccgaaaagttgaaagcgaagggcatttcagtgttcggggatcttgaacagggaaagctgaagttgatcgcttccgacttatcgaacggcaagatgcttgtgctgcctgacgatttaaacaggtacggtttgaatccagggcgattttccgtcgccagggcggtccggatgagctgcagcatcccttatttttttgagccggtgaagctcaagtcacctctcggaatcagcgtcgtcgtagacggcggagttctgagcaattttccgatgtggctgtttacaacagaaaaaaaacggccggtattgggcatcacgctgatgcccaatgaaaaagagaggccgaagaaaacgattaaaaatgcgttcgagctgttcggggcgctgtttgagacgatgaaagaggcgcatgacgccaggcacattgccacgaaacatgagcggaacatcatttttttgcctgttgaggaagttttgtcgactgaattcgcgatgtcggcagaaaaaaaactagctctaatcgagctaggaaaaaaacgaacagaattatttttgaaacagtggacgttttaaaagaaagccctgtttttctttttgctttttttgccttcaatcactgtcagctgggtctggctttttttcttcaccaataccggcttcgatttattgatagacggtacgcttctcaggtgattgaccctgccttttacagagcgttttttatgatcctgaaaacgcttgttggattgtttggctgctttcttaaaagcggctccctcactgcccatattgcgattggaaatgcgcctgatcacgaaataaatgatggcgccgaccgcggcaaaaacaagcaagtattggagcaggcggcccggacttgtgacggcgaaataaacaaacccaaaaattccaaacgcaataattaaagctgagacaggatgtacgcgttgcttcataactgtccacctcccaaaaaattaaccaattcgttacattacattacgatattagaaggttccttctgttcgtcctctgctttggtttccatatgaagaagctcattgaagcttgcgattgccacttccacctgatcgtcagacggctctttcgttgttaaaagctgcagccataagcccgggtagccgagcgccttcaatacagggatgtctctcagtttgtttgtcagctgcaggacttcaaatgaaatgccgagaacgacgggtatcagtgcgagtctattcaaaatacgaacccagagagggtcagtaggaacaagcaagtaaacaaacatgcccacgatgacggtgaatagaataaagctgcttccgcaacggtagtgcagtcttgactgccgctgaacgttttcaaccgtgaccggcagattttgctcgtaacagtttatgaccttgtgttctgctccgtgatattgaaaaactcttttaataaaaggagtgcatgatatagcgtaaatatagcttaggagaaggagcagcttaaagaagctttcgatcataatctgcgcgacgtccgactgaaagaccggacgggtgagctccgctaaaaaaacgggcacgagcgtaaaaataaacttgccgaacaaaaaagacaggacgccgactgcggcgagaccaaaaatcattgtcagattggacggcttctcttctttcaattgatcgtctaaagaagggtcgaggtcatagcgttcgctcgaaaaattcaagtgcttggtgccgttagcgctcgcttcaacaatcgcgataatccctctgagaaaaggaattttctttaatttttcaagcgtcggattggttttccgaggcagcttgaaaaattcaatgcttccgtcttttctgcggatcgcggttacataatggcgcctgccgccgaacatgacgccttcgacgacagcctgccctccgtatgcgggctgttttgtttgatttgacatttgcatcaacctatctgtatcaatctatgagtacattaaccatttccttacacctattgtacaggaaaaacgctgaaacctctagattgacgggctcaaaaatttaagaaattcgaacctcttacaaagccaaatctaattaaagtataccctttttcatgctttttacactcggattttaaaaatctgggaaagctgatgttgccgcggctgtttttggacatactggaaatggaggtgatctggactgtatgggtaatgaagacaatcaaaaacagccggaagagcttgagcagaataagcgtgaaaccccgatgactttcaccggaagggtgatcatgactggctttgtcggcggagtgctctggagtgcactcggtgagctggcgtacctttttaagttctccgaggtcaatgcgaacatgattctccagccttttgtcatcggcgactggaaaaacggatttctcggaacgtttatcagcatactcttgatcggagtgatttccatcggggctgccttgctttactacggcactttgaagcaggtcagaggcatgtgggcaggcattgtctatggagccgttttgtgggctgtcgtgttttacctgttcaatccgatgtttcccgatgttcagacagtggctgaattaaagagggaaacgattgtgacgacgctgtgcatttatctgctttacggtttattcgtcggctattccatttcgtttgaatacaatgagctcaattctgaaaaactgacgcgcgcccttggagaaacaagagaatagtgcctgatcaggaagcaatatgataaaatgttcactgtaagtggacatttttttgcgtgatgagaagggggaggcagagttgccgcatattttaattttgaacggaccgaatttaaaccggcttggaaaacgcgaacccgatgtatacgggacagacacattaaccgatttggaacaaagactttttcaatttgccgaaggcattcagacagaattgactttttttcagtcaaaccacgaaggggacctgattgatgctcttcatgaggcagaggagcaatacgatggaatcgtcttgaatccgggggctttctcgcattacagctatgccctccgcgatgcggtggctgcaatcagcataccggtgattgaggttcatctttcaaatcctcatgcaagggaagagttccggcaccgctcggtcatcgctccggttgcaagaggccagatcaccggactcggctttgaaggttataagctggccatctcttattttatgaacacaaataacaaatagggggactagtggacaatgaaactaaacaaattgagagagcttttcggcggtttaggcattgacggtatattggtgacgagcggcgttaatttgcggtacatcaccggatttaccggatcttcaggactggcggtcatctcagacgatcaagcagtctttattacggatttccgctatacagaacaggcgaaggatcaaatcaaaagctttgacatcgttcagcatgccggcggaatcgttcaaaagaccgccgaagtgatcaaagagatggggataaacaaaatcggttttgaacaggataaaatgacatacggaacgtatgccgcctacaaagagcagcttggcgcagctgaactcgttcccgtttctcaatctgtggaaaagttgcgcttgattaagtcaagtgaagagattaagatattaaaggaagctgcaaagattgcagatgatgcattcagccatattctgacggtcatcaagcccggcatcaccgaaattgaagtcgccaatgagctcgagttttacatgcggagccagggagccgatcattcgtccttcgatatgatcgtggcgtcaggcgtacgctcaagtctgccgcacggagtggcaagcggcaaagcgatcgagaaaggcgaccttgtgacgctggactttggggcttactataaaggttactgctcggacattacgcgtacagtcgcggtaggagagccggatgatgagctgaaacgcatttatcaaaccgtgtttgaggcgcaggctatcggcatgcggagcatcaagccgggaatcaccgggaaacaggctgacgcatacacaagggactacatatcttcacaaggctacggcgattatttcggccattcaacaggccatggcctcggcatggaagttcatgaaagtccggcgctttcagcacgttctgaccagatgcttgaaaaaggcatggttgtaacggttgaaccgggaatttacataccgggcaaaggcggggtcaggatagaagatgatattgtcctgacagaggaaggaaacgaatcccttacccattccgcgaaagatttaattattttataatccgtttgattggagcaataggaggataatcatgatttcagtaaacgattttcgcacaggtttaacgattgaagtagacggaggcatttggcgcgttgttgacttccagcacgttaagccgggaaaaggcgcggcatttgtccgctcaaaattgagaaatcttcgcacaggtgcgattcaggaaaaaacattccgcgcaggtgaaaaagtggcccgcgcccaaattgaaacaaaaacgatgcagtacttgtatgccaacggcgatcagcacgtttttatggatacgacatcttacgagcagcttgagctgaacgagaagcaaatcgaacacgagctcaaattcctgcttgaaaatatgtctgttcagatcatgatgtatcagacagagacgattggaatcgaacttccgaacacggtcgaactgaaagttgttgaaacagaaccgggcattaaaggcgacacagcctcaggcggaacaaaaccagcaaaaacagaaacaggccttgtcgtcaacgtgccattcttcgtaaacgaaggagatacgcttgttgtcaatacttctgacggttcttacgtatcaagagcataaaggtaacagcgggaaagagccggcttcattgaagccggctctttttttgctgtctgaaatcttttacctctcacatgccaaatagaaaaatcggaagactactttttcaaaggagagcatagagtgtaaaaaaagaggaagtgttactggaggtttaagatcatgaagcttttctttggacaagtcaatccgacggttttgacaatggcggcgttaagggtggtatcatctttgatcgaactgacggcggctgttgtgatgcttttgacaaacgacgtcagaaaagctgtggcggtcaacagcgtactggccatggtcgggccgctcatctttattattacaatgacaatcggcatctatcagattgcagggcagctttcttacgcaaagctgattttgatctttatgggagtggttttgatcatcgcggggatctataaatagcgacacatgataagagaggccgacttgtcataatgtcttcctttgatcatacatttttatagaagacaagcaaaaagaggagggagtgtttttgcaccacatcacagagattctccccgatacgatcaaacgcgcgctcagcggtcttggcgaccatgaaatcgatcagatagaagaaattcgggttcggacaagtcgtccgctggaactggtgaacaaaggaaagccgcgctttctcccttatgtggcgacgcctgaagactcggcgcttcttttaaacagattgggaaattacagcatgtatacactggaagaggaattgaaaaaaggatatgtcacgatcagaggcggacaccgcgtggggcttgccggccgggttgtcgtcgaaaacggggccgtcaaaggaatcagagaaatatcatcatttaatattcgcattgccaaagaaaaaatcggcatttccaaaccgtatgtcccccatttatttcaaaactcgtggctgaacacgctgattatcggtccgccgcaaaccggaaaaacaacactgctcagagacctcgccaggctgatcagttcgggaagcggcaacgcccctgccaaaaaagtgggaattgttgacgaaaggtctgaaatcgcaggctgtgtaaacggcataccgcaatatcggctcggcgaccgggcagacatccttgacgcctgtccaaaagcggaagggctgatgatgatgatcagatcgatgagtccggaggtaatgatcgccgatgagatcgggagaatggaagacgcagaagcgctcttggaagcggtccacgcgggggtgactgtcatcgtttcggctcacggctacacatatgcagatctcgccaggcgtccatcattgaaaatgcttcaagagcaccgggtttttgagcgaatcgtggaactttccagaaagaacggtcccggcagcctgagccgcatcctaaatgggaacggagagccgctcggggcagcaaagaggatgttatcatgctgaagcttttaggtgccgtgcttattttggcagcagccacatggacaggatttgaaatggcgaagcctttcagggaaaggccgaagcaaatccgccagctgttggccgctttgcagtctttggaggctgaaatcatgtacgggcatacaccgctccgtcaggcatcaaaacagatcgcacaccagcttaccgagccggtagcctctttgtttcagacatttgcagaacagcttgaaaaaggcagcgcttcagcagggacggcatgggaagacagcctggagaaagtatggcccgaaacggctcttaaaaagaaagaatacgagattttacggcaattcggcgaaacgctgggccgtcatgatctgatttctcagcaaaaacatatcaaactggcgttaacccatttagagacagaggaagctgaagcaaatctcgcccaggcgaaaaatgaaaaaatggtcaaaagccttggatttttgacgggactgctactgattcttctattgatgtaatgaagaggggagcatacacgaaatgggagtagacgtaaatattatttttcaaattgccggcgtcgggatcgtcgtcgcttttcttcacaccatactggatcaaatggggaagaaggaatatgcccaatgggtcacgcttttaggattcatttatatattgttcatggtggcaactgttgtcgatgatctattccaaaagataaaagctgtctttctatttcaaggataggggggctcactcattgaaatcgttcaaatcgtaggactgggaatgatcgccaccttcctcagcttgattgtgaaagagcaaaaaccgacgtttgcttttttgattgtcgtttttgccggctgcacgatttttttattcttagtagatcaggtctacgaaatcattcggatgattgaaaaaatagctgccaatgccaacatcaacatgatgtatgtcgaaacgattttgaagattatcgggattgcttatattgcggagtttggcgcccagctgacaaaggatgccggacagggtgcgattgcttcgaagatcgaattggcaggcaaaatcctcatcttagtcatggctgtgcctattttaaccgtgattatcgaaacgatcatcggactcatcccttccatgtcttagtcagaaaggaggatttcctgagtgaagcgttttctgttctggctcttggtcatcggaatcgtatgctttggagcgcataatgtacaagcttcgccaaaagaagcggagccggctggggaaaccgccgcagaagaatcggcagaagccattgcaagagagcaggctgaaggtttggaacttgaccgggtcggggagttctggaacaacattttgacagagtatgggggacaccttcccgaaagtcaaaaaggaagcctgcttgaatttgtcaaaggagaaaagcacttttcgcctgaggaatggggcaaagcgctgttttcctacttgttccatgaagtgctggctaacgggaaactgctggggacgctgatcctgttgaccatcttctgcgtcctgcttcagcttttgcaaaacgcgtttcaacaaagcaccgtcagcaaagtggcgtatgcaattgtctacatggtgctgattattcttgcgctcaacagctttcgggttgccgtcacatatgcgaatgaagcgattcagacgatgacaagctttatcctgtcgctcgtacctctgcttctggcgctgatggcgacttcggggggagccgcctcagccgcattctttcatccggtcattctttttctcatgaacacgagcggcttgtttatccaatatatcgtgttgccgcttttatttttatcagcgattttaagcattgtcagcacgatgacggaccaatataaagtcacacagctggcccagctcctcagaaatgcggcgatcggcacgctggctgcatttttgaccgtattcctcggtgtcatctcggttcagggcgcctcagccgcagtgacggacggcattactttgcggacggcaaaattcattaccggaaacttcatccccgtattgggccgcatgtttaccgaagcgacagacacggtgatcagcgcgtctctcctgctgaaaaacaccgtcgggatactcggtgtggcaatcttaatttgcatcgcagcctttcccgcgatcaaaatcctttccctcgcgctcatatacaaaattgccgcggcggttctccagcctctcggaggcggcccggttatcagctgcctggatgtcatcagcaaaagcgtcatctacattttcgcggccatggccatcgtttcgctgatgtttttcttaagcttaaccgtgatcattacagcggggaatctgacgatgatgatgaagtagggagggatgagatggaatttctgacagagtggctcacgaatattattctatttattctgatggcgatcgtcatcgatatgcttctgccgaattcgagcatgcaaaaatacgcgaaaatggtgatcagcctgctcttgatcgttgtaatactgaacccgatcttctctttattcaggacagatccggatgtgatttttgagaagcttacaaaaaacggacaagttcagtcaaacgaaataaaaaatcagctgaattcagaaaaaaaagaaatacaagcctcacaacaagcatatatcttagaacagatggctgttcaattggaaaagaacgcagagggcaggtttacaagcgacaaatacaagatagaccgagtcgaggtctcttctgacagccagctgaaaacagagaaagacctcagtaagcatgcggaagtctcggtattcttgaaaccagcatcggaaaaaacggtccaagccgtcgctcctgtcgagatcaatacggaccggagctaccagtccatgcaggaaagagaaaagaaagagacgggggaagtcagagaacagctagcaggcatctgggaaataagccccgacaagattacagttcatatcgaagggggagaacgaagcggcaatgaataaaagaacctggatcgaaaagctgatcggccacctgctcccgaaagacgagaaagacggaaaaaagctgacgaaatatcactactttctgctgctttttgttctcggcgtttccttcatgctcgtcagccagatcttctcttccgaaccttcccaagagccagcggcagatcagccggcggcttcacaaaaagctacgtctgaaagcaccgtacagagcggtgaaggagaaaaagaagtgttcaagcccgcctcagatgacaaaccgaaggaatcgatccaagattacgaacaggaatatgaaaatcagctcaaagacatattggaaaccatcatcggcgttgaggacgtgtcaatcgtcgtcaatgttgatgcaacctcattgaaaatattcgagaaaaacagaaaaacccaggaaacttcaacgaatgagacagataaacagggaggcaagcggacggtgtctgaaatgtcttcagacgaagaaatcgtcatcatcaaaaacggagataaagagacgcctgtcgtcgttcagacgaaaaagcccgatatcaggggtgttctcgttgtcgctcagggagtcgacaacgttcaaataaaaaagaccattattgaagcagtgacaagggttcttgatgttccgagccaccgcgtcgctgttgcccctaaaaaaatgaaggaggattcataaatgatgctgaaaaaacaaacggtttggcttttaaccatgttaagtctcgtcgttgtactgagtgtctactacattatgtcgcccgaaggagaaaatgtcgtcacggttgatgacaaggaacaagttgccgctgaaaaagaaaaaccgatgaaagaagagcctgccaaggatggcaaagatgataccgcgcctgctaaagacaaaactgaagggaaagatacaaaagataaagaaacgtctgcgagtgagcagaacggagaggttgtcacagaggaatcatcgggtgatgaagatttattcacaacataccgcatggaaatggacgatcagcgcagcagggagagggaggaattaaccgaaatcgtcagaagcgataaagcgacggcaaaagaaaaaagcgaagcttacgacaagatgacagagctcagcgaagctgaaggaacggaaaagacccttgaaaccctcatcaaaacaaaaggctataaagacgccttggtcaacgccgacggcgataaagtcaatattacggtgaaggcgaaggagcactcgaaagccgctgccaccgatatcatcgacatcgtcgcaaaagaagtgaaaaacttaaacgatgtggctgtaacgttcgagccagcagattaaacctatcccgcttgcaaaaagcgggatttttttatgcctaaggcccctgttggtgcagggcgtccatgattgtagttgaattcggcattcctctcctgtaagatgaatatagtatgtacttttagtactaactgataaatgcgtaaaatctttttcattaggagtgcgatagcatgttaaacattgatgaaatcagacagttgataaaattaattgatgaatcttcgataaatgaatttacatacgaaaacgaaggatcgaaggttgaactgaaaaaacaaagcggaaccgtgcaaaccattcagcaagtggctgcggcgcctgttcaggcaccggctccggaagctcaggccaagcaagcgcctgttcaggatgcgcctgcaaaagaagaagcggcaaaagaaggcggaaacttccacaagatcacctctccgatggttggaacgttttatgcatcttcttcgcctgaagccgacccttacgtaacagtcggctcgaaggtaacagagtcctctgtcgtctgcattgtggaagcgatgaagctcttcaatgagatcgaagccgaagtgaaaggcgagatcgttgaagtattagttgaaaacggccagctggttgaatacggacaacctttatttttagtaaaagcagagtaaggagcaataagatgatcaaaaagctattaattgcgaacaggggagaaattgctgtcaggattatcagagcttgtaaagaactggggattgaaacggtagccgtcttttccgaggccgacagagaggcgctccatgttcagatggctgatgaagcattttgcatcggacctaagctttcaaaagacagctacttgaatataacgaacatcgtcagcgtcgccaaaatgaccggtgctgatgcgattcaccccggctacggcttcctggcagaaaacgccgattttgccgagctttgcgaagaggtaaatgtaacctttgtcgggccgacagcagacgcgatttccaagatggggacaaaggatgttgcaagggaaacaatgcagcaggccggtgttccgatcgtaccgggctccaaaggaattattgaagatattgaagatgcggtttcattggcccgcgatatagggtatcctgtcattataaaggcaactgccgggggcggcggaaaaggaatcagggtcgcccggacggaagaagagctgatcaacggcattaaaatcactcagcaggaagctgccaccgctttcggcaacccgggtgtgtacattgaaaaatacattgaagatttcagacacgtcgaaatccaagtgcttgcagacacacacggaaacacgattcatttgggggaacgcgactgctcaatccaaagaaggctccaaaagctgcttgaagaaaccccttcacctgctctggatgaaggaatcagggagcagatggggcaggccgctgtcaaagcggctgaagccgtgaagtacacgggagcgggaacggtagaatttatttacgattaccgcgagcagaagttctactttatggaaatgaacacgcgcattcaggttgagcatccggtgacagagatggtgacgggcgttgatttgattaaagagcagatcagagtggcgtcaggcgaaaaattaaccctcacccaggatgaagtcacctttaacggatgggcaatcgaatgccggattaatgcggaaaaccctgagaaaaacttcatgccttctccgggaaaaatcgagatgtatctgcctccgggagggctcggcgtcagagtggactccgcggcttatccgggatactcgattcccccttattacgacagcatgattgccaaagtcatcacttacggaaagacgagggaagaagctgtttcaaggatgaaaagagcgctgagcgaattcgtcatcgaaggcgttcatacgacgataccgttccatctgaagctgcttgagcacgaaacattcgtaagcggagaatttaatacgaagtttttagaaatatatgatgtaatggggtcgtaattttaacggaggtgaacatattgaaagacgacaacagcttattggaaatgagccatgaagacaatcatttgggaaaagtggaaatcgctccggaagtgattgaagtcattgccggaatcgcagcttccgaagttgaaggcgtagctgaaatgcgcggcaattttgcgacaggtgtcgtagaacggtttggaaaaaagaatcacggcaaaggcgtcaaagttgatttgtccgatgacggaattatcattgatgtttattgcgtgatgatgtttggcgtgtcgattcctaaagttgcgaatgccgttcaggataatatccgccagacgcttctcaatatgacagctctttcgattaatgaaatcaatattcacatcgttggcattcaattcgattcaaaaacgcacgaggtggaaatcgatcaagagatgtagtgcggtgaagtggaagaaccaaggggaatgacggccctttggttttttcatgttccgttttaaaaaatgacgtttaaaagcatctttccgccgatatcgatcaaaaataagatgaaccggagagtttgttgagaagttcgaaaaacgaatgataataaacgattgttccttattattcggttattgacgataaaaccgcgatttttgcatgcggaaagactaaaaatatgatatgatctctttgtggcttaaacggcaagcagcaaagagggtaaaaggagaaaaagaaagaatgaaaagaagaacagcaagagaaaaggctttgcagtcactattccagattgatgtcagtgatatagaaccgaatgaagcgatgcagcatgccttggacgggcaggaaagcgatgcttttttcgaacagctcgtttacggggtcttagagaacaaagagaaaatcgatgagatgatcaagcggcatctcgtcaattggaagcttgacaggctggcgaatgtcgaccgcgcgattttgcgtttgtccgcctacgaaatgatctttttagatgacatacctgtcaacgtctctatgaatgaagcgattgaactggcaaagcaatttggtgatgacaagtcggcgaagtttgtaaacggtgttctttctaacattaaatccgatcttgaataatctaggaggagagcaaatgacagcaaccatcatcgacgggaaagaaacagcaaaggaaaagcgcgggcagctggccaaggaagttgaagagctgaaaaaacaaggagttaccccgggactggccgttattttaattggtgatgatccggcgtctctttcatatgtacggggaaagaaaaaagcagctgaagcaatggggattcgttttcagctggatcatttcgatgcaagcttcactgaacaggagcttcttgaagtgattgaccagtacaatcaaaatgacgactttcacggaattcttgtccagctgcctcttccggatcatatttccgaacaagcggtgatcgagagaatatcccctgagaaagatgttgacggttttcatccattaaacgtagggaagatgctgcttggcgaagatacgtttctgccttgcacgcctgcggggatcgtggagcttttaaagaaaaccgagattgacctgtcgggaaaagaggttgttgtcgtcggacgaagcaatatcgtcggaaagccggtagggcagctgctcttgaacgaaaacgcaaccgttacgtactgccattcaagaacggccgacattacggctcatacaaaaaaagccgacattctgattgtcgctgtcggaaaggcgaatttcatcaaagcggatcaaattaaagagggagccgtcgtcatcgatgtcggcgtcaaccgccttgacaacggaaagctcgccggtgatgtcgattttgaagaagcgaaggaaaaggcttcctatattacacctgtaccgggcggtgtcggtccgatgacgattacaatgctggcccacaacacggttaaatcagcgaagcgtacaattcaactttaatgtacagccgttcatccgcctggtctcgcgccggcggatgaacgttcttgtgccttcttagaaaggagactgtgccatgagtgaaatatcatttgtcacggtcacggctttgacaaaatatattaagcgcaaatttgacgtggaccctcatcttgaagatatttggatcaagggcgagctgtcaaatgttaaaatacatagcagaggccatatttatttcacactgaaagatgataacgcccgcatccaatccgtcatgttcgccagacaaaacaggaatctcgcctttacccctgaaaacgggatgaaagtattggtgagaggcggcatttcggtatatgaaccgagcggcagctatcagctttatgcaaaagaaatccagccggacggcataggtgcgcttcatctcgcgtatgaggaacttaagaaaaagctatcgcaagaaggcttatttgatgaaaaatacaagaaacccatccccgcgttcccatccgtcgtcggtgttgtcacgtctccaactggagcggctgtacgcgatgtgatcaccaccattaaaagaagatatccccttgtaaaagtgatcgtccttcctacgctcgttcaaggagtaaacgcgggcgagtccatcgtaagcagcattgaagaggctaaccgcagagacttatgcgatgtattaatcgtcggtcgaggaggaggatcgatcgaagagctgtgggcatttaacgaagaggccgtcgccagggccattttttcttctgacattccgatcatttctgccgtcgggcatgaaacggattttacaatcagcgattttgtcgccgatttgcgcgcggcaaccccgacaggagcggccgaactggccgtacctaatatgcttgatttgctggagcgtctgaaaacgctcgaagcgagaatgacaaaatcgatgcagcaggacttaaaaaagcggcaggagcgggtgaaaaaccttcagtcctcctatgccttccgatacccgaagcggctatatgcccaaaaggaacaggaattcgacctgatattcgaccgtttccaaaaacagctggcgatgaccgtcgaccgcaaaaaacaaaaactgaacgaacagacatacaagctggagatgcttcatcccgaggagcagcttaaacaagcgcgaaaaaggcatgaagagcaaacagtccggctgaagcggaatatgaaagtgcagctgaagcagattcactcgcagtttcaaacggttcttggtaaactgaatgcattaagccctctccaagtgatggaaagagggtacagtttgacatataaagaaaacgaattgattaaaagtattgaacaggttcatgaaaaagacgagatccgcgtcacattaaacgatgggacgctgacctgtgaggtactgcaaaagagaggcgaaacaaatggctgaagaaaacaaaacaaaccgggatgacctgacatttgaagaggcgatgaaaggtttggaacagatcgtatcaaagcttgaagaaggggacgtgcctttggaaaaggcgatcgactatttccaggaggggatggctctttcgaaaatatgccacgaaaaactgcaaaatgtcgaaaaacagatggacttcattttgcgggaaaacggggaattagctcctttcagtgttcgggaggaggaaaaaggtgaccggtaaacttgaaggatttttaaaatcgagaaaaacagtaattgaagagcgccttccgatgtatattaaagacttgcaagcgccgtccatcctcaaggaatccatgctgtactcattggaagccggggggaaacggctgagaccgatattggttcttgcgcttcttcatgcgtacggaaaagacgaagaagccggaattccagtcggatgcgcggttgaaatgatccatacgtattcattaatccatgacgacctcccttgtatggatgacgatgacctcagaagaggtaagccgacaaaccacaaaatttacggggaggcgacggccattctcgcgggagacgccttattaaccgaaagcttcaaaatgatcacttccaatatgccttctgatgtatccgctgaaaagcgcatcagactggtgaacgagctgatttcggcagcgggggccgaaggcatggtcggcggtcagattttagatatggaagcggaatcaaagtctgtatctcttgatgaactgcagcgaatccacgaaggaaaaacggctaaactcctcagcttcagcgtcattgcgggagccattcttgcagatgcatctgaaaaagagatcgaaaagctgcgcgaattcagccatcatatcggcatcggctttcagatcagagatgacattttggaccttgaaggctcggaggataagatcggcaaacggatcggatccgacgcttcaaacggaaagtcgacgtatccgtcgctcctttcgcttgagggcgccagccaaaaacttgatgaacatattgaaaaagcaaaacagctgatttcagagcttccgcttgaaaaagagcttatgtacgagttctgcgatatgattgccgctagggatcattgatacagggcttccatttgagcatcaaaggcttattgtgataaaatgtagagagttgaactctaaaacgccgcgccgttatcacgttgtgttagcggctgttttttcaaacgaagcgtccgcatatgcaagtttgcgcatggggatgaattcatcatataataattcaagctgaaaacctaaaacgaagcaaggcgcatacttgcagaaatcatgctgaaagtgagttgatccgattggatctgttatcgataaaggaccctgcatttttgaagaacctttcaaatgaagaactggaaagcttgagcgctgaaattcgccgttttttaattgaaacgctttctgaatccggagggcacattggtccgaatctcggcgttgtcgagcttaccattgcattgcataaagaatttgacagcccgaaagataagttcttgtgggatgtggggcatcaatcgtatgttcataaactgttgaccggccgcggaaaggacttcgccacgctgcgccagcataaagggctgtgcggttttccaaagcggaatgaaagcgaacatgatgtctgggaaacgggccacagctcgacttctctctccggtgcgatggggatggcggctgcgagagacttaaaaggcacaaacgaatatatcatcccgatcatcggagacggtgcactgaccggcggcatggctcttgaagcgcttaaccatatcggccatgaacaaaaagatatgattgtcattttgaatgacaacgaaatgagcatcgctccaaacgtcggagcgattcattccatgctcggaaggctgcgtacagccggaaaataccaatgggtcaaagatgagctcgagtatttgttcaagcggattcctgctgttggcggaaagcttgccgctacagccgaacggattaaagacagccttaaatatctgctcgtatccgggatgttctttgaagagcttggatttacgtatttagggcctgtagacggccattcctacgatgaactgtttgagaacttgcagtatgcgaagaaaacgaaaggcccggtactcctccatgttattacgaaaaaaggaaaaggctacaagcctgcggaaactgataaaaccggaacatggcacggaaccggcccatataaaatcgataccggtgactttgtcaaaccgaaagctgctgcaccatcatggagctcgctcgtaagcgaaacggtcaggaagcttgcccgcgaggatgaacggattgtggccattactccggccatgcctgtcggttcaaaacttgaagggtttgcgagcgaatttccggagcgcatgtttgatgtcggcattgcggaacagcatgcggcaacgatggcggcgggacttgcgacacagaatatgaagccgtttctggcgatctattcgacatttcttcagcgcgcctatgaccaggttgtccatgatatctgccggcaaaatctaaatgtatttatcggcattgacagagcaggtctcgtcggcgccgacggggaaacacaccagggcgtgtttgacattgcttttttacggcatattccgaatttggttctcatgatgccaaaagacgaaaacgaaggccagcacatggtcaacacggctgtcaaatacgacgacggcccgattgccatgcgctttccgcgcggaaacggactcggcgtcaaaatggataaagaattaaaaacgatcccgatcggaacgtgggaagtgctgcgacctgggacagacgcggtcattttaacgttcggcaccaccattccgatggcgcttgctgccgcggaggagctgcaaaaagaaggccgttcggtcagagtggtaaacgcccgttttatcaagccgctcgatgaaaacatgctgaaggaaatcctgaacgaggggcttccgattttaacgatcgaagaggctgtgcttcaaggcggattcggcagctcgatccttgagtttgcccatgaacatcagtcttacagtccgatcattgacagaatggggatacctgatcaatttattgaacacggcagcgtcgccaagcttctggaagagatcggaatgacaaaagaagacgtcatcagacgaataagacttttgacgcccgtaaagactcataaaggaattggatcatgacaggaaaaaaagaacggctcgacgttttattagtagaaagagggttaatggaaacgcgggaaaaagcgaaaagagccatcatggccggcattgtctatacgaatgaaaacagactggacaagccgggcgaaaaggtcgaccgcacgatcccgctgaccgttaaaggaaacccgttaaaatacgtctcaagaggcggattaaaacttgaaaaagcattaaaggagtttcagctctccgttcaaggcaagctgatgattgacatcggctcgtccaccggcggctttacagactgtgcgctgcaaaacggcgctctttgctcatatgccgttgatgtcggttataatcagctcgcctggaagctgaggcaggatgagcgggttgttgtgatggaacgcaccaatttccggtattgcacacctgccgattttacggaagggctgccggagttcgcgacggtcgatgtctcttttatctcactgaaaatcatcctccctgtgctgaagaacattttagtgccgggaagcgactgcatcgctctcgtcaaaccgcagtttgaagcagggcgggaatccgtcgggaaaaaagggatcgtccgcgatcccctcgtccataaagctgtgcttgatgacatcagccggtttgcggctcgagaaggatacgactgccgaaacgcctcgttttctccgattaccggcggcgacggcaacatcgaattccttctccatttgcattgggacggagaggcgcaatccggaacgccgatagcggaagaaacgatcaatcaaattgtcgaagaggctcacaagacattaaaagcgaaaaaaccggatcagcgtgattaaaaacccttgcagggccgtacggcgaatgcgagggttggccggcacgcaaaaaggaataatagtgggctattattccttttttactgcaaacatgtacttttccgacaaaatcatttaacataaatgtataaacatacacaatttgtgtataaaacgaggtgtgaaatgaacaaaggtcaaaggcatattaaaatcagggagattatcaccgcgaatgaaattgaaacgcaggatgagcttgtcgatattttaaagaaagacggctataatgtgacgcaggccaccgtctcacgggatattaaagagcttcatttggtgaaggtgccgacaaacaacggttcctacaaatacagcctgcctgctgatcagcgctttaatcccctttccaaattaaaaagatcgttaatggacgcattcgtcaaaatcgactcagccagccatctgattgtgttaaaaacaatgccgggaaacgcgcaggcgatcggggcgctgatggacaatttggattgggaagaaatcatgggaacgatctgcggagatgataccattttgatcatctgccggacgcatgatgatacgaaagtcgtacagaagaaaatattggagcttttataaacgaaggcctgaaaagaggtgtcatgaaagcttgttagctgaattatcgatcaaaaactttgcgattatcgaagaattaaccgtttcttttgaaaaagggctgacggttctaaccggtgaaacaggtgccggaaaatcgatcatcatcgacgccgtctctttgcttgtcggaggccgcggatcgtccgaatatgtcaggtatggcgaaaaaagggccgaattggaagggcttttcctccttgacggcggccatccggtttttgatttgtgcacagagctggggattgaagcctcggacgacatgatcgtcatgagaagagatattaacgcaaacggcaaaagcatctgccgcgtcaatggaaaacttgtcaccattgccgcattgcgggaagtcggcagactgctgcttgacattcacgggcagcacgacaatcagctgctgatggaggacgagcaccatcttcagcttctggacaggttcgcaggagaagaaatcgagaatgctttaaaagcgtatcaggaagtttacagccgctacatggatgtcatgaagaaggtgaaagagctttctgaaagcgagcaggaaatggctcacaggctcgatttaatacagttccagcttgacgaaatcgaatcagcaaaccttgagccgaaagaggacgagcttcttcaggaagagcgccgtcaaattgcaaatttcgaaaaaatatacgaagcgctgcaaaatgcctataatgcgcttcgcaatgagcaggccgggcttgactgggtcggcatggcttcaagcgagcttgaaaacgtctcaggcattaatgaagggctcaataaagtatctgaatcggtagccaacgcttactacattctcgaagattcaacctttcagatcagaaatatgctggatgaactcgaatacgaccccgagcgcctcgattatatcgaatcgcgtttaaacgaaatcaaacagctgaaacgcaaatacggcgctactgtcgaagacatccaagcttattcggctaagatagaggaagaaatcgaccggatcgaaaaccgggacagccacttgcaggctttaaaatcacgactcgaatcaatcggcaaggatgtggcgattgaagcagccaatgtgtccgaaatcagaaaaaaatgggcggaaaagctggccaaacagattcagcaggaattgaaagatctgtatatggaaaaatcgacatttgatacggaatttcatgtgaaaaaagcggaacgggatgatgatgcacccgtcgtcaacggaatgcctgttcagctcacaaagcacggcattgacaccgttcgtttcctgatctccacaaacacgggagaaccgcttaaatccttgtcaaaggttgcttcaggaggagagctctcaagaatcatgctggcgatgaaaagcattttctccgctcagcaggatgttacatcgatcattttcgatgaagtggacactggtgtaagcggaagagtcgcgcaggcgatcgctgaaaaaatacaccgcgtctctatcggctctcaagttttatgcattacccacttgccgcaggtggccgcgatggctgacacccaccttttgatcacgaaacagtcgaaagacgggagaacaacaacaagcgtcacacctttgtcaaaacaggaaaaaatagcggaaatcggccggatgattgccggcgttgaagtaacggatttgacgaagcgccatgcgaaagaacttttaaatcaagctaagctagtcaaaaccagcggataagctgttcattttttgaacagcttatttttttgtcggcattttcttatacaaactctttcttatcattttatccaatgtttttcttccgttcacagttataaatcgccgtccggaaggcaaaagtaatgaatgtagcgaaagaaatttatatggtgtgggttaggtgcgaggagagtgaaaaggtggatgttgaaaaaatcagaaaagctgtgggtataattctccttgtttctttaataagtgtaggattttacaaaccggtgaaagaatacattgtaataccaaaaaatttgaacatttttgagacgggtacccgtgcggttgaaacgagcttatccgtcagtactccgaaagatggatcatcagaagcattcacattgaaagaaaatcaaaacgaagtggaaataaaaggcgaaaagaatggaaaggccgaactcgtctatgactttgccggatttccggttaaaaaaacgaaagtaaatgtcctgcctgatttgaaagtggttcccggcgggcagtccattggtgtaaaacttcattccgttggtgtattggtcgtgggttttcatcaaatcaatacctctgaaggcaaaaaatcgcccggtgaagcagccggaatcgcggtaggcgacattatcaccgaaatcaacggcacgaaaatcgagaaaatgaatgacattaccccttttattcaaaaggccggaaaaacaggagaaaccttacatctgtcgataaaaagagataaacaggaaatcaaaacgaagctcgttccgaaaaaagaccaggctgaagacaaatacagaatcggcttatatatcagggactctgccgcaggaatcggcacaatgacttttttcgagccgaaatcgaaaaaatacggagcgcttggccacgtgatttcagatatggatacgaaaaaaccgatcgttgttgaaaaaggacaaatcgtgaaatcgaccgtcacctcgattgaaaaaggaacaggcggaaatcccggagagaaactggctcgtttcgcatcagaacgaaaagtgatcggcgatatcaacagaaacagtccattcgggatcttcggaacgcttcacgagtcaattaaaaaccgcatcgctgacaaagccattccgattgcattttcagatgaagtaaaagaaggccctgcccaaattttaacggttattgaaaacgacaaagtcgagaaattcgatattcaggtcgtcagtacgacacctcagaagtttccggccacaaagggcatggtgctgaaaatcaccgacccgaggctgttgagtaaaacaggaggcatcgttcaagggatgagcggaagcccgatcatccaaaacggaaagatcattggcgccgtaacccacgttttcgtcaatgatccgacgagcgggtacggtgtgcatattgaatggatgctgtctgaagcgggaatcgatatttataaaaaagaaaaagcaagctgactgccggattcctccggcagtttttgatttcgcctttttttcttgggcgttgtgcgttaaaatgaaagaagaaaagatttttcgacaaattcacgttccccggtttgtcaagtcgcattttaagtcgaaaaatcgagaaaatcagaaaaaaacagagaaaaagctagacataccactattattggaaaaatcctttttaaaaaaagggaataaagtggtgctgtcgaattaaacatattagaaaaagaatgatgaaatttatcaacatacacattggggaggaagaaacgtggagaaaattaaagtatgtgttgctgatgataacagggagcttgtcggcctattaagcgaatatatcgagggacagagcgacatggaagtgcttggtgtcgcatacaacggacaggaatgcctttctttgtttaaagacaaggagcccgacgtgcttgtgctggatataatcatgcctcatctcgacggattggccgttcttgaaaggctgagggaatcgcagcttaaaaagcagccgaatgtcatcatgctgacggcgttcggccaggaagacgtgaccaaaaaagctgtagatttaggcgcgtcgtattttattttgaagccttttgacatggagaatttagtcggacatatccgccaggtcagcggaaacggatctcaattgacacaccgtgccccgtcctctcaaagcagtgtgcttcggccgcagcctgaatcgccgaagaaaaacctggacgccagcatcacgaccatcatccacgaaatcggcgtacctgctcatattaaaggctatttgtacttaagagaagccatctccatggtatataacgacatcgaactgctcggcagcattacaaaagtgctttatccggatatcgccaaaaaattcaacacgactgcaagccgcgtcgaacgggcgattcgccacgccatcgaagtcgcatggagcagaggcaacatcgactcgatttcgtcacttttcggctacacagtcagcatgtcaaaagcaaagccgaccaatagtgagttcatcgcgatggtcgcagacaagctgagactggagcataaggcttcttaaacgttgatatgacgcagttttaacgaagatttaaccgtcgaattttcgacctgtttctaacgaatagtttatcgtaattccgatgaatttttcgcccatattgcgatgaaattgtgctacgatccgaagggtttaatacagtatttgaaggcctcgtttttataaacgaggccgtttttttgcccgcaaatgtactgtttgcgatgtaagatcaaaaaggtgaatcatttcagcacagtgtgtattgtgtaaagtcatcctaaaagcttatctattgattccgaaatattgtaatttgtacactttttggacatacctgcatgttatatgatgaaatagaaatgaaataaatggaaaaggagttgttttaaaatgaaggtcaataaattattaactggtacgactctggctgttggtttacttatttctcagcgccggtatttgctgcatcgcattcatctgaggtgattgcacatccgactgctcaatatatcaattgtccaagtgacttgccaagctcattcaaaagcagtaaatcatcaaaatgtgtaaaatcatcttctggagttttcagtaacaaattttctgatagcgatggaacatggtatttcaaagggaaattttacagtaatgtttttaatacttgggttggtttttatgaaggatgaaccaaaaaaggggggctcccccttttttttgttttccttttagtatcaagtaggaaatagatggcggagaatgtaaaactcttcgaagagccgatctcgagttaaaagtatgaaataagcgggtggtatgatgatctttacgaaaacagatcttcgctatccggtgaattttttcgggccagggttgaggattaaccattacggattgctcatcgtaaacagcaatgcaaaaataggtgcaaactgtgacattcatcaaggggttaatatcggacaaaatcacgctcgccgcgatgttcccacaatcggagacaatgtctggatcgggccgggggcaaagctctttggcgacattcacattgctgacggcatatcaattggcgcaaacgccgtggtcaacaaatctttcactgaggaaaatattacaatagccggcatgcctgccaaaaagattaaagaggcgccgtcaaataaagaccggaagcaagctgttcagcggcaaatacaagcatgagaaatggagcagcgctgctgatcatccgctatgaaggcctaaatgtaaaaatgatttaaaaagaatatttgatcttgcattcgtgcaagttctgacaaaaaaactacatagcgcggcagccagttgtgtttccgtctatttctcaaagtttgtctcacgctcggagcattgctgtcatagactggatcatataaagcgaaagccgaataaaacgtcttttttcataagaaaaaagacgtttttttatacaaaaaaataaaaatgatgaaaaagatctgatttcttccagtttacagccatttttcgccttgggtagatcgtttttcacagacgtttttacgcggatggcttctaacaattcggaaatccttggggaattggacggggaaagcgggcgaaaacctgctgctgcggcttgctttacagccccgggtattaaagataaggtacggggtgtaaaaaattcagcgggtgaggtggtcgacatgaggaaaggagtcatccttgttctgttcgctatgctgttattggcaggctgcggcacaacgcagcataatgggcaaagcggtgatgagagccgaaaaggaacaggcgaggaaacgctcgtgaaagaaggcacctttgtcggtttggcggaccagcataccgtcgccgtcaatattgacggcaaagaaacgatgtttcaggtccctcccgaaaaacgggacaaatataaagggatcgaggatgatacaaaggtggaagtggagtacacgaaagcagaggacggaacattacagcttgaagatatgaaaaagaaagaatgatcgtttgcaaaaagggattgtaggaggaacaaatcgtgaaactgttaataaagagttttgttttgctgctgttttcgtttatggcggcttttccagctgcttttgcggctgagccgctttccgggaagacggtatatgttgacgcaggtcacgggggtgaagacagcggtgctgtcggaaacgggctgcttgagaaagatgtcaaccttgaagtggcaatgctgattgatgaaaagctgaaagaagaaggagccgacacagtcgcctcaagaacggatgatacgtttttgacgctggaagaccgggtggccaaggcgagcaaaaatgcttcagacttgtttatcagcattcatgcaaactcggccgtccctgaagcgtccggtacagaaacatatttcgattccacgtatcaagccgctgacagcgaacggctggcatctgacattcaagagcggcttccggatgcgctgggcactcgggacagaggtgtaaaagaatcagggttttatgtcatcaaaaattctcaaatgccgagtgttttagtcgaactgggctttatcacaaacaaaactgatgcagataaactcgaaagtccggaatatcaggaaaaagctgcagacgcgattgctgacgctgtcgtatcttattatgaataatagaagggccctggtatatgaccggggttcttgtgttatgtttatgttaaaaaaggccttatgtgtggaaagaaaacagtaagaccttcataatgggttataaacttgcaattcttgtagaggtgaaccagaaatgacgaaaatatttgcacacagaggggcttcaggcacttttcccgaaaatacaatggcggcgtttaagcatgcggcggccattggtgccgacggcatcgaattggatgttcaaatggcaaaagacggacgtcttgttgtcattcatgatgaaaagcttgacaggacgacttcactgaaagggtatgtgaaagatcttacatatgaggaaataaaacatggagacgcaagccaccgttttgccgaaaaaaccggttctgtccctgtgccgacccttgaagaagtgtttgagtgggcggcagatgctgaatttcttcttaatgttgaattgaaaaacagcattatccgctatgaagggatggaagaaaaagtgatgtcgatgattgaagcgtacgaccttcaagaccggatcattctttcatcattcaatcatgaaagccttgcgttatgccacagactgaatccaagtattgaattggctgcgctttacatggatgtcatctacaagccggaggaatacattgagatgattccggcttcaggatttcatccgtatcgccgttcaatgtcggatgacacgatcaaaaacgcccatttgaaagaaaaagcggtcaggccgttcaccatcaaccgtgaagaggagatgaaaaagctgattgctgcgggaatagacggtttcttcaccgactttcccgaaaaagcgttaaaattaaaggccgagatgtgagatgcaaaaagccgcagatattgtctgcggctttttcttgttcacagatatcacacctcgcggccgctctgcttttttctgaaacgggggcttacttggttgcgttttctgtctctgtatagaataaatccgcctaacaaataaaggccgcctgcgaagcatatgaaccccgccagcccctgaagccaaaggatctgaaacgggccgatcaaaatgccgaaaaccgtgtcgcgcatcaatttaattccgagagcagccaggcctcccgggatcagcaaaacgagcagtgcgatcattctccccatacacgaatccccttaccaaagatttacctttattgtctatttgaaaaaaaagtttgtcaagaaaggaaaacatgataacatagatgttgtgcaaattgttgcaagagaacgtgagagtgtgcaaaatttttcatacaaaggggtaaagggatgatgcaaaaagtactgatcgttggtgctggaaaaggggggaccgccctcttggatttgctgctgaaaacaaagacgatgcatatcgaggcggtcatcgataaaaatccggaagctcccgggcttttcgtcgcgcagaaaaacgatatcgaaacggcactcgactggacgccatacatcacagaacagatcgacatcatcattgagacgaccggagacgccggcgtgttaaagcagctgatgcgaaaaaagcacgacagaacgatcgtggtgccgggatcgctcgcttatatcatctctcagctgatgaatgaaaagcagcagctcatccaaatgttaaaagagcagacgtataaacacgaccgtattttcaactcgatgaatgacggcatgatttttatcgacattaacgaagagatcattttgtttaacaaaatggcggaggttatgaccggaacaaagcgcagcgaagcgatcggccagcatattcaaagcgtgatcccgacgacgaagctgccgcgtattctcaacacgagagagcctgagtatcatcaaaaacaatttctccatccgaacaggcagattgtcacgacccgaattccgattattgatgacggaggaacgctcctcggggcgctcagcatatttaaggacattaccgatgcggtcgagctggctgaagaggtgaccaacctgaaggaagtcagaacgatgcttgaagcgatcattcaatcttccgatgaagcgatttcggtcgttgacgaaaacggaaacggaatgatgatcaacagggcatatacgaagatgacaggtctgacaaaagaccaggtgatcgggaagccggctaataccgacatatctgaaggcgagagcatgcatttgaaagtgctcgaaacgaggcgccctgtcagaggggtcagaatgaaagtcggcccgaataaaaaagaagtgatcgtcaatgttgcgccgattatcgtcgacggcattttaaaagggagcgtcggcgtcattcacgacgtatctgaaattcaatcgctcacaaacgagctgaacagagcacggcagattatccgtacacttgaggcgaaatatacatttgccgacatcatcgggtcaagcgagcagatgctcgtcgcgctggaacaggcgaaattgggggcgaagacgcctgcgacgattttgctgagaggcgaatcgggaacgggtaaagagctttttgcccatgccatacataacgaaagtgaccgaaagtataataagtttgtccgcgtcaattgtgcggccatatcggaatcactgcttgaatcagagcttttcggctatgaggaaggcgctttttcaggtgcgcgccgcggcgggaaaaaaggattctttgaagaagcgaacaacggaagcattttcttggatgaaatcggcgagctctcgctaaacacacaggcgaagctcctccgcgttcttcaggaaaaagaaatcgtcagagtcggcgggaccaaaccgatccctgtgaacgtccgggtcatcgcggcgactaacgtcaatattgaaaaggcgctcgctgaaggccggtttcgcgaagacttgtactaccggatcaatcgctatccgatatcgattccgccgctcagacagcggaaagaggacattgaagccttgagcaggcatttgatagggaagatcaaccaagagtacgggcgcaatgtaaaggggcttacgaaaaacgccctcaaatcgctaaaagcgcggaagtggccggggaatgtcagagagcttgaaaatgtcctcgagcgggcgatgatttttttaaaaccgcaaatggaatggattgatctagaacatcttcctgaagcggaccgtccgagaaaaaaggtggaagccggcgaagctttccctgaaattgaagatgaaaagctgtctgatgcggtcgaacggtttgaagctcatatcattaaagaaacgcttgaaaagcatcaatataacagaacgaaaacggcaaaagctcttggaatcagcattcgcaacctctattacaaaatggataaatacaaccttgcaaaagatagcatgcaataaattgcaaaaacgagtgcaaaatcatgcaaactgtaaacaggttcacagtaccgaaccgcttttttcatactggcacgaaacttgcatgatatagtgggcggatgtttgcttagaaaggtgggtactatgaagctgaaacaactattgcaaaaagcggcggagcttgacaataaaacggtcgccgtcgcacatgcggaagatgacgaagtgctgcaagcggtcaaacttgcggtcgacaaacaatttgcccggttcttgctgatcgggcacagagaaaaacttagacatatgatgacagagcagaatatttcaaaacggcacgtggatatcattcattcggaatcgccggcggattctgcgagaattgccgttcaagctgtcaaaagcggcaatgcggatgttcttatgaaggggaatgtcccgacagctgtgctattaaaagccgttttgaataaagagtacgggcttcgttcctcgcacgtgctgtcacatgtagcagcatttgaagtcagcgggtttgagaggctgatttatgtaacagatgcggcgatgaatatcagccccaagcttgatgagctgaagcagattttagaaaacgcagtcggcgtggcgaggtcggtcggcgtgcaaatgccgaaagtcgcttgtcttgccgcagtggaaacagtgaatcccgcgatggaagcgacattgaatgcagctgccttgacgcagatgaatcatcggggccaaatcaaaaactgcgttgttgacgggcctcttgcattggataacgcgatatcgccgcttgccgcccggcataaaaacatttccgggatcgtagcaggcgaggccgatatcctgcttgttccttcaattgaaacaggcaatgtcctttataaatcattgattcattttgcgggtgcaaaagtgggagccattttagcaggggcaaaagcacccatcgccttgacaagcagggccgattccgcagaaaacaagttgtattcgattgctttggcgctgtgtacgtctgaagcacgacatgaggaggaataaaaaatggaactatttcgatatatggaacagtatgactacgagcaattggtattttgccaagataaacagtccggtttaaaagcgatcatcgcgattcatgatacgacgctcgggccggctctcggcggcacaagaatgtggacatacgaaagtgaagaagccgcaattgaagatgcgctgcgccttgcgcggggaatgacctacaaaaatgcggcggccggactgaacctcggaggaggcaaaaccgttattatcggagatccgcgcaaagataaaaacgaagaaatgttccgcgctttcggccgctacattcaaggcttgaacggcagatacatcacagccgaagacgtcggtacaaccgttgaagatatggacatcattcatgacgaaaccgatttcgttacaggcatttcacctgctttcggttcatcaggaaatccttctccggtaacagcttacggggtatataaagggatgaaggcggcggcgaaagcggcattcggaacggattcgcttgaaggcaaaaccgttgcggttcaaggcgtcggaaacgtggcctacaacctgtgccggcacctccacgaagaaggcgcgaaactgatcgtgaccgacatcaacaaagaagcagttgaacgtgcagtcgccgaattcggcgcccgcgccgtcgatccggatgatatttattcgcaggaatgcgatatatatgcgccgtgtgccctcggagcgacaatcaacgatgatacgattccgcagctgaaagccaaagtgattgccggggcagccaacaaccagctgaaagaaacccgccacggtgatcaaatccacgacatgggcatcgtttatgccccggactatgtcatcaatgccggcggcgtcatcaatgtcgctgacgagctttacggctataattcggagcgcgcgctgaagaaagtcgaaggcatctacggaaacattgaacgcgtccttgaaatttcgaagcgcgaccgcattccgacatacttggccgcagaccgtctggcggaagaacgaattgagcgcatgcgccaatcgagaagccaatttttgcaaaacggccatcacattttaagcagacgttaaaatcataacccctattctctattggaggttttaattcaatgcaggtacaggaaaaacgtattctcgtcatcaatccgggatctacatctacaaagatcggcgtttttcatgatgaccgttcgattttcgaaaaatcaatccgtcatgacgaggctgagctacagcaatatcagaccattattgatcaatattcgttcagaaaacaggcgatactcgaaaccctgcatgaacagggaatcaatatttctaaattggatgccgtttgcgccaggggagggctgcttcggccgattgaaggcggcacttacgaagtcaatgatgcgatgattgtcgatttgaaaaacggctatgcggggcagcatgcatcaaatctcgggggcatcatcgccagggagattgccgacgggttaaatattcccgcttttatcgtcgaccccgttgttgtggatgaaatggctcctatcgcaaaaatttccggcaccccggctattgaaaggcgcagcatttttcacgcgctcaaccaaaaagcagtcgcaaggaaagcggcttggcagtttgggaagcgttatgaagatatgaaaatgatcatcacccacatgggaggcggcattacgatcggcgtccattgccgcggccgggtgatcgacgtcaacaacggcctccacggggaaggtccgctcagtccagagcgggccggaaccattcctgcgggtgatctgatcgatatgtgcttttccggcgaatatacgaaagacgagctgatgaaaatgcttgtcggcggcggagggcttgccggctatctcggcacgacggatgcggtaaaagttgagaaaatgatcaaggaaggcgatcaaaaagctgcgctcatctatgaagcgatggcttatcaaatcgccaaagaaatcggggcggccagcgccgtcttaaaaggcgaagtcgatgtcattattttgacaggaggactggcatatggaaaatcgtttatttcctcgatcagacaatacatagactggatttcggatgtcgtcgtctttccaggagaaaatgaacttcaagcattggctgaaggtgcatttcgcgtattgaacggcgaagaagaggcaaaacagtatccgaaccagaggagggaaagtcatggcaactgaatacgatctcgtgattcttggagggggcacaggcggctatgtggccgccatcagagcctcgcagctggggctgaaaacagccgtcgttgaaaagcagaagctcggcggcacgtgccttcataaaggctgcatcccgtcgaaggcgctccttagaagcgcggaagtatacaggacagcaaaaaaggcggacgaattcggagtggtcattcctgaagtcggactgcggttttctcaagttcaaagcagaaaacaaaaaataattgaccagctgcacaacggtgtcaaacacttgatgaaaaaaggaaagatcgatgtttacgaaggaatcggacggattctcgggccgtcgattttttccccgatgcctgggacggtttccgttgagatggcgaacggggatgaaaatgagatgctcataccgaaaaacgtcatcatcgctacaggctcaaggcccaggtcgctgccagggcttgagcttgacggagaaaacgttctgtcatcagacgaagcgcttgaacttgagcagcttccggcttccatgctgatcgtcggaggaggtgtcatcgggatcgagtgggcttccatgctgaacgatttcggtgttgatgtcaccgtcattgagtatgcagaccggattttgccgactgaagatgccgatatttctagggaaatgcaggcgcagctcgcgaaaaaaggcatcacaatgatcacgggagcaaaagtgctgcccgacacattggagaaaggcgatgcggtcagcattcaagcggaaaaagacggagaaaaacaatcctattccgctgagaaaatgctcgtatcggtcggaaggcaggcaaatattgagggtatcggtctggaaaacacggatatccaggtggaaaacggctttatcgtgacaaacagcatgtaccagacaaaagaatcccacatctatgcgataggagatgtgatcggcggccttcagcttgcacatgtagcttctcacgaagggattacggccgttgagcatattgctggtgaaaacccgcacgccatcgattattcgcttgtttcaaaatgcatctattcaagccctgaagccgcatcggtcggcttgacagagggtgaggcgaaggcgcaggggaaaagcgttaaagtaggcaaatttccgtttcaggcgattggcaaagcgctcgtgtacggtgagacggacggctttgtcaaaatcgtcgccgatcgcgaaacagatgacattttgggcgttcacatgatcggcccgcatgtgacagacatgatatctgaagccggtctggcaaaggtgcttgacgccaccccgtgggaagtcggtcaaacgatccacccgcatccgacgctgtcggaggcgatcggagaagccgcccttgccgtggatggaaaagcgattcatttttagaaagcatgaaggagtgaaaaaaatgggcaataaccgtcatgaagcagtgggattaacagatgaacaagcaatcgacatgtacaaaaccatgcttttagccagaaaactcgatgagcggatgtggctcttaaaccgttcaggcaaaattccttttgtcatctcttgtcaaggacaggaagcagcccaggtcggagcggctttcgctttagaccgggagaacgattatgtgcttccgtattacagagatatgggcgttgtgcttgcttttggaatgacggcaaaagatttaatgctgtcggcgtttgcaaaagccgaggatccgaattcaggaggaaagcagatgccaagccacttcggccaaaagaaaaaccggatcgtcacgggctcttcgccggtgaccacgcaagttccgcatgcggtgggcgtagcgcttgccggaaggcttgacaagaaagacattgcaacttttgtgacgttcggcgaaggctcttcaaaccaaggggacttccatgaaggggcaaactttgccgccgtgcataagcttcccgtcatttttatgtgtgaaaacaataaatacgcgatctcggttccttatgaaaagcaggtagcttgcgaaaacatttccgaccgcgccgtcggttacggcatgcctggcgtgaccgttgacggaaatgatccgcttgaagtctacaaagctgttaaagaagcaagggaacgggccggaagaggcgaagggccgacattaatcgaaacgatatcataccggctgaccccgcactccagcgatgatgacgaccgaagctacagagagcgcgaagaggtggcggaggcgaagaaaaatgatccgcttaacaaattcgcacaatacttaaaagaagcaggtcttctggacgaccagtctgagaagcaaatatcggatgagatcacaaacatcgtcaatgaagcaacagattatgctgaacatgcaccttatgcagatccagaagatgcgctgcggcatgtttatgcggagtaagggggaagaacaatgccagttatgtcatatatagatgctgtcactttggctttgaaagaagaaatggaaaaggatccccgcgtctttgttttaggggaggatgtcggcaaaaaaggcggtgtattcaaggcgacagccggtctttacgaccagttcggcgaagagcgggtgatggacacgcctttggcggaatccgcaattgccggcgtcggaatcggggccgccatgtacgggatgagaccagtcgctgaaatgcagtttgctgattttattatgccggctgtcaaccagattatttcggaagcggcaaaaatccgctaccgctccaacaatgactggaactgtccgatcgtcatccgcgcaccttacggcggaggcgtgcacggcgcgctgtaccattcacagtcggttgaagccgtgtttgccaatcagcccggcctgaaaatcgtcatgccttcgacgccttatgatgtcaaagggcttttgaaagcggccatccgcgatgacgaccctgtgctgttcttcgaacataaacgggcataccggctgatcaagggcgaagtgccgagtgacgactatgtgctgccgatcggaaaggcggacgtgaagcgggaaggcgaagacattaccgtcatcacatacggattgtgcgtccatttcgcccttcaggctgccgaacggcttgccaaagacgggatttccgcacatatccttgatttaagaacggtatatccgctcgatcaggaagcgattattgaagcggcttccaaaacgggcaaagtgcttttgatgaccgaagatacgaaggaaggcagcattatgagtgaagtggccgcgatcatttcagagcattgcctgttcgatttggatgcgccgattaagcggttggcgggccctgatgtcccggcaatgccgtatgctcctacaatggaaaaattctttatggtcaatccggataaagcagaagcagcgatgagagaattggctgagttttaatatagcgaaggaggacacatcgtatggcagtggaacaaatgacaatgccgcagctcggggagagcgtgactgagggaaccatcagcaaatggctcgtcagcgtcggagatcacgtcaacaaatatgatccgattgctgaagtgatgacggataaggtcaatgctgaagtcccttcatcgttcacgggaacgattgccgagctagtcgggaaggaaggcgaaactctgcaagtcggagacgtcatctgcaaagtcgaaacaaatgaagaagcgaaaccggaggctgaggctgtttccaagccagatcaagaggaagcggagccggccaaaccggaggcgaaagatacaactcagaaaaaacgttattccccggcggtgctgagacttgccggagagcacaacatcgatttggagcaggtggaaggtacaggcgccggcggacggatcacaagaaaagacatccagcgcatcattgcttccggagctgttcctcaaactgatgcagcgccggaaaaacagccgggtgcaaatgccgcgggagcgattgaacctgatcaaaaaccggcgcaagccgcacctcaagctgcaccgcctcaaagtgcggccggagacgttgagattcctgtaactggaatccgcaatgcgattgcgaccaacatggtcagaagcaagcatgaaatccctcatgcctggacgatgatggaagtggatgtcacaggtcttgtgagctaccgcaacaaaataaaaaacgaattcaagaaaaaagagggcttcagcctgacctttttcgcgttttttgtcaaagcagtcgcacaggcgctgaaggaattcccgcaaatgaacagcatgtgggccggagataaaatcattcagaaaaaagacatcaacatctcaattgcagtagcgactgaagatgcgttatatgttcctgtcatcaagcatgccgatgaaaaaacgattaaaggcatcgcaagggaaatctccgaactggctcataaggtcagaagcggcaagctgaccagcggggatatgagcggaggtacgtttacggtcaataataccggttcgtttggatcggttcagtcgatggggatcatcaaccatccgcaggctgccatcctgcaggttgaatcgatcgtcaagcgtcccgtcgtcatggagcacggcatgatcgcggtcagggatatggtgaacctatgcttatccctcgatcacagagtgcttgacggcctcatttgcggcagattccttgcccgtgtgaaagagattcttgaacagatcgatgatcatacgtccatctattaaaaaagccggcccgtttagggtcagcttttttctttttctaagggggtgagcatgcggaggtgcccgtttagcacctcgattgaagccggcgtttttgtgcagatttcgccgtctgtatcggcttccatgggaagggcggtttcaattcgaacggtttgcccctgataataggatagctcgcctttaaaggaatcccattcgggatcatccattgcaaaaagctctttcaatgcagccagattcgtattccggcagacgagaatgtccgcttttccgtcgttgatgctcagctgcggaagggggatcttgttcgttccgataaaggggccgttcagcacgacaaccatgaccgcttcgtcagcaaactcttctccgtcgatcgacagacgaaaagagaagggctcaagattggagattgtccgcagtgcgcttgtaaaataactgattctcccgagcagcgctttttccgtttgattgatatggctggaagcttccgtgatcaatccgatgccccaaaagttgagacaataatgatcattcgcttttaaaacatcgaccgggacgggacttccattgacgagcgcttccgccgctttctctatgttctggggaatgcggagcgccctcgaaaagtcgttacatgtaccgccagggaggatgccgatatctggcttggtttgaagctgactaatcccgttaatgcattcatgcaccgtcccgtcaccgcctaagataaacaactgcccgatatcctccccgatctccaggcaaaattcgaacgcatcgcgcttttttctcgtcggtttcacgatgagttcgtctatagcttgtgaaagaatcggtacggcagcaccgagtgttttttcaacatttttttgccctgcattcccgttgtaaatcagcattgctttctttcggttcataaagtactcctttatttatagggtctttacttatttttccccgggctgcccgttccgtaaacctgaaggaacacgaatcgcctgatttgcggtccgggcggtttcaaagtatcattagaacagatgagcaaacagcggctttagcatcatgctataagcgctaaaaaggagagatcttaaagtgaacatggattttaatctgtttatgaacgatgtcgtacgccaggccagacaagaaataacggctgccggctacaccgaattgaaaacgcctgaagaggtcgatgaagcgctcacgaaaaaaggcactacgcttgtcatggtcaactccgtctgcggctgtgcaggggggattgcaagacctgccgcgcaccatgcggttcattacgataagcgccctgatcatctcgtcaccgtttttgccggacaagacaaagaagcgacggcaagagcaagagaatattttgaaggatatccgccttcttctccgtcattcgcccttttgaaagacggcaagattttaaaaatggtggagcgccatgaaattgaaggctatgagccgatggctgtcatcaccaagcttcaaggactgtttgaagaatactgtgaagaagtataatggaaaaactgcctgccaaaacagatggcaggctttttttgtgtataaaaatgctttttgtatgcaatcagaaagataaagacacaggcgttcaattggtatttaaaggcttatttaaaggtttttagttatttttcaaaatggtattgcatccgcctcggaaaatgtttaaaatacataacaacgaataaatattcaaacaggttcagggggatacgcaacatgaaaaaatggatgttactggtagtgacagcatgtgtcacatttgcattgactgcttgcgggacgagcagcagctctgatgataaaaaaacattggtgatgggaacttctgccgattacccgccttttgaatcgaaagacggggataagattgtcggttttgatgttgatctggccgaagcactggctgaaaagacgggccatgaaatcgaagtgaaagacatggacttcaacggcttggtgaccgctcttaaaacaaacaaagtcgacattgtgctttcaggaatgacgccgacgcctaaacgcaaaaaacaggtcgatttttcaaatgtctactatacggctcacaacatgatcgttacaaaaaaatcaagcggcatcaaatcgcttgacgatctgaaaggaaaaacggtcggcgtacagcttggctccatccaggaagaaaaagcaaaggagctcacgccggattacgatttaaaagttgaaaaccgcaaccgcatttcggatttaactgaagaaatcaaagcgggccgctttgacgctgcaatcattgaagatatcgttgccgaaaaatatattaataaaaatgaagaactggctggctacaatctgccgaaagaaccggatgaaaaagccggctccgcgatcgcctttaaaaagggaagcgatttgaccgagaagttcaacaaagcgcttgaagaaatggagaaaagcggagaacttgataaactgaaagaaaaatggttcggcggagaaacaaaaaagtaagcgtaaaaagttcaactttttgttgaactttttttttctaaagcgatgtacgcctctttgatcatgaggcgggagagggagagtcatcatgaattttcttgatttttctagtacagtacccgaaatgcctttcatcctggaaggcttgggcgttaccttaaaagtggtcgcggctgcggccgtgcttggatttttgctgggggttttgattacgcttttaaaaatcagttcgatcaagcccctcgcatggattgcagacttttacacttccatattccgggggacaccgctcgttctgcagctgatgatcgtctattacggactgcctcaggtgctgggctttgatattgatgcttattgggcggccgtcatcgcattcggcttaaattccgctgcttatgtatcagaaatcatcagagcaggaatcaatgcgatcgacaaagggcaaaaagaggcagcgatggctctgggcgtcccgtatgcaaagatgatgaaggatctcttgctgccgcaggcctttaaaaatatcatgcccgcgctgatcaacgaatcgattacactgacaaaggaatcggctgttgtcaccgtcatcggactcggcgatataatgaggcgaagctatcaggcgggagctgcgatctacagcccgcttgagccgatgctgtttgcaggcctcatctactatgtgctcgttttgatcctgacgtttgtcggcaaagcgattgaaaggaagctgaatgtcaatgattaatgttcgcaatctctcaaaatctttcggaaagcacgaggtgcttaaacatatttccgtttcctttgaaaaaggcgaagtagccgcagtcatcggcccgtcgggatcaggcaagtccacgtttctgcgttgcttaaacctgctcgaaaagccgacggagggcagcattttcattcaggatcaagagattacaagcccgaaaacaaatgtgctgaaaatcagagagaacatcggcatggtctttcagcattttcacttgtttccgcataaaacggttcttgaaaatattacgtatgcacctgtccatgtcaaaaaagaaagcaaacaggcggctgtgaaaaaagcggaagaactgcttgagaaagtggggcttctcgataaaaaagatgattatccgaaccgtttatcagggggacaaaagcagcgcgtcgcgattgcgagggcgctggcgatgaatccggatatcatgctgtttgacgaaccgacatcagctcttgatcccgagatggtcaaagaagtgctccaagtgatgcaggatttggcgaaaaccgggatgacgatggtgatcgtgacgcatgaaatgggatttgccaaagaagtcgccgacagagtgcttttcatggatgaaggaaccattgtagaagacgacgatcctaaagcgtttttttcttctccaaaatcgaaaagagctcaagactttttagagaaaatactataaaataagctgaagaagatgctgatcttcttcttttttattcactaagactagcagaaaagattggggttaacgatgtttaaaataggttatcgcacattaaaaacagcgcttggaacagcattggccatctatatcgcacagctgctcggcctccataattttgtgtcgacagggatcatcacgatcctctgtattcaagtgacgaaaaaacggtctcttcaggcatcatgggcacggtttgcggcatgcatacttgcgatcgtcttttcatgcgcattttttgagctgatcggctatcatcctgctgtcatcggtctgatgctgctgttctttattccgacaaccgttcttctgaaaataaaagaaggaatcgtcacaagttcggtcatcattcttcacctttatatgtcggaagggatcaccctttctctcgtttggaacgaattccttatcatcattacgggaatcggcgtagccctgctgatgaatctgtacatgccgagcctcgataaagagctcaaacagtatcagcagaaaatagaagataactttgccaagatttttgaagaaatcgaacggtatttgctgaccggggagcaggattggacgggaaaagagattcctgagacgcaccgtttgatcaatgaagcgaagaccctggcataccgcgatgtggaaaatcattttctcaggcacgaaaacctctattatcactactttaaaatgagagaaaagcaatttgaaattatcgaaagggttctgccgaaaatcacgtcgatttcgatgacggttgaacaggggcagatgatcgcggcgtttctccatgatttaagaggagccatccatcccggaaatacggctcataaatttttgaagcggctcgtgaaaatgagagaggaaatcgaagagatggagctgccgacgacacgagaagaatttgaagcgcgcgctgctcttttcatttttctcggcgaaatggaacagtatcttgtgattaagagttactttaaaggtattaaatctcctgcataaccgcatgagtttctccttcattggtcaatctaatgaaacagggagaagcttgtgcggttttttctattcttcccggaagcctgagcccgaaaaaagcaggcgtttctccgaaaaaagaatcgcctgctttcatgatctgtattaaaaaatcatgctgattccggtaagcagagtggtcagcaccatgacgccgatcattaaaataaccatgaacttgatgaattttcgagacaagcttttcacctctgttttttaatctcccattattttatactgctttttttcatcggacaagtttcgttcttggaatcaaatagagaaggggcagaacgtgatgaatatgtttgaaagagtcgacgatttaaacaacagccgccaaaaagcttcgctcggaggcggccaggaacggatcgacaggcagaagcaaaaaggcaagctcaccgccagagaacgaattgatcttctgcttgatgaggggacgttcactgaactgaatgcctttgccagaagccggcagtccggcggcccgttaggcgacggggttgtcacgggattcggaaagatcgacgggcggcccgtttatctattttcccaggattttaccgtcaccggcggagcgctcggagaaatgcacgccaaaaaaatagcggccgtcatggatcttgccctcaaaaataaggcgccgttcatcggtctgaacgactcaggtggtgcgagaattcaagagggtgtgctatcattagatggatacggtcatattttttaccgaaatgtcctttgctcaggcatcattccgcaaatctctgtcattctcggcccttgtgcgggcggcgcggtttattcccccgctttgaccgacttcgttttcatgagcgaaaaaaccggacagatgtttattaccggtccgaaagtcatcaaaacggcgacaggcgaggctgtcagctccggtgaattggggggcgcctatatacataattcaatcagcgggaatgcccatttttccggggattccgatgaggccgtccttcatgaggtgcgcaagctcttgtcctacatcccccagaatcacgaagaaaagcctcccgccaaggcgagaaaggcgaaagatcatgagataaggcctgctttaatgacgatcctgcctgaagacggtcagcgtccgtatgacgtcaaacagatcatcgcggaaatcgcagacggcggaacattttttgaagtgcagtgccattttgccaaaaacgcggtgatcggttttgcaaggatagcgggggaaacggcggcggtcgtggccaaccagccgaagtatttagccggaagcctcagcatggatgcggctgacaaaatcgcccggtttatccgtttttgcgattcctttcagatcccgattttgactttggttgattgtcccggttttcttccgggaatacgcgaagagcacggcggggtgatcaggcacggcgccaaaatcctttacgcgtatgcggaagccactgtcagcaaggtgacggtcattttaagaaaagcatacggcggagcatatgtcgctttaaacagcaaggcgcttggagcggatgccgtgtttgcgtggccgaatgcagaaattgcagtgatgggcgcctcggaagctgcagacgtgctgtttgcgaaggaaatcgaacggtcagacgacccgcgggccgcccgggaggaaaaaatccggaagtgcatgcaggcttcaagcccttttaccgctgcaagatacggcatggttgacgatatcatcgatccgaaagagacgcggaagaagctgatccaaacgtttgacatgctgaagagcaaaaaagaaatccggccggacaaaaagcatggaaatataccgctttaaaaaatggaggggaaactagcatgaataaaaaacgcttgttagaagagtttttagaacttgtgcaaattgattccgagacaaaacatgaagctgaaatctgcaaggtgctgaaagaaaaatttgcggcgcttggaatggatgtcgtggaagatgacacaaagccaaaaaccgggcacggagcaggcaacctcgtgtgcacgcttccgggaacgaaagaagcggacacgatttactttacatcccacatggatacggtcgtacccggaaaaggcgtaaagccggtcattgaagacggatatgtcaaaacagacggcacaacaattttgggagccgacgacaaaacaggccttgcagcgatgctagaagccgtaaaagtgctgaaagaaaaaaacattccgcacggaacgatccaatttatcattacggtcggtgaagaatcggggcttgtcggagcgaaggctctagaccgttcgctgatcaaagccgattacggatatgcgcttgattccgacgggaaggtcggcaatattatcgtggcagcgccgacacaggcgaaaattagagcaactgtctatggaaaaacggctcatgccggtgtagagccggaaaaaggagtctcagcgatcacgatcgcttcaaaagcgattgccaaaatgccgcttggccgcatcgacgaggaaacgacggctaacatcggccgctttgagggcggaacgcaaaccaatatcgtctgcgatcaagtcgacattcttgctgaagcccgttcgcttgttccggaaaaaatggaaaagcagacggaaaaaatgaagcaggcgtttgaatcggcagccgccgaaatggggggcagagccgaggtggaaatcgaagtcatgtacccgggctttaaatacaaagacggtgatcttgtcgttgaaattgccaaaaaagccgccgggaaaatcggccgtccgtacgagctgttgacgagcggcggaggaagcgatgcgaacgtcatcgcaggccacggcattccgactgtcaaccttgcagtcggatatgaacagatccatacgaaaaacgaaaaaatgccgattgaggaacttgtcaaaactgcagaaatggtcgttgccattattgaggaagtagcgaatcgttcataaaggcggggttttacaggggaagttgccgttcgtttcagctcttagagcggcgttctcgaacaaaagagccgtctcattattctcatcagccctttagtcgcgattgagaagattaaagggaaacgcaaaaaagcttgcgcctttaaaggcgcaagcttttttattttgtagccgattcagcaggctgaatggcttttttgtttttttggtaaacttgatgaagaacgaccgattgaatcgtcagaagcagtccgcttgtcagccagtacagcggcagggctgcagggacattgatcgaaaagatcgtcatcattacagggaaaaagaagcccatgattttggcggactgctgagccgccggatttgattgggcgttctgtgcgttcagcttttgagacacatagaactggataaaatacatgaacccggcgcttaaagatacgataatatcagaatgcccgaggttaaaccagagaaaagagtgcgaagcaatttcaggcgtcgagcggatcgcataatagaaaccgatcagaatcggaaactgaatcagcatcggcagacagcccatcgccagcggattgatgttgtgcttttggtaaagctgcatcatctcctgctggatttccctctgcttcacggggtctttcgtcttttttaacctgctttgaatcgcatccagctcaggtttgacaagcgccattttttcctgcatcgcccgctgctttttatactggttggcaaacagcggaaaaacgagaacccggacgatgatggtcacaaaaataatcgacaatccgtagtttccgtggaagattccggcgattcccttaatcagctctgaaaaaggcaccacgacataatggtggaagaagttgtcgcttcctccggtgctgccggtggctgccgaagcttgttcacctataaacatagtcatgatcaaaaacattgcagtcgcaaacaattgctttagtttcgtgttcaacacgttctcctccttctaaataagggcccgtatgccggacgcccttcacgtttaaattgaaagaagaaggaaacggtggtcttcatcgtcgttcgatgaagctttcatgcgaatgactttacttatccataccgtaatgcgatgatataggatgatgagaaaatcgactgcagaaacaaactgtattgcatgatattcttcaaaccgtttcgttttccagctgtctcccgtactgcaatccttcaggatcagggcgataccgatcgccgtcagtgcggggaggacgattgtgaaaaactcaatcagaaaaaaagcatcgttgaaagattcaagaatcatcttttatcacttccgtttcatttaacatcttactatatgaaagccgggatgtctaatcagagtgccaggagggagccgttttgtctgctgataaacaaaaggggagagtcatctttcatatcgatatgaacagcttttacgcgtctgttgaaatggcgtatgacccttcgctgaaaggcaggccgctagccatcgcgggaaatgcgaaggagcggaaaggaatcgtcgtcacgtgcagctatgaggcgagagcacgcggcgtcaaaccgcccatgccgctctgggaagcgaagcggctctgtcccgagctgatcgtcaagccgccgaatttcgaccgctacagaagctcttcaagagaaatgtttcaagtgctcagggagtacacggaccttgtcgagcctgtttcgatcgacgaagggtacatggacttaacggatacgccatacagaaatcgggcatgcgaaacggcgaaggaaattcaggagcgccttcaaaaggaactgctgcttccgtcaagcatcgggatcgctccgaataaattcctggccaaaatggcttcggatatgaaaaagccgctcggcattacgattttgagaaagcgtgaagtgccccggattctttggcccatggacatcagcgagatgtacggagtcggccggaaaaccgccgaaaagcttaagacgctcgagatcgaaaagatcggcgatttggctgccgcagatgagtatgctttaaagcgcctcctcggcatcaacggcccccgtttaaaaagaagggcaaacggcatcgacacaggagaagtgaatcccgacagaatatacgaattcaaaagcgtcggcaattcctcgaccctcccgcatgacagcacagatgagaaagagctgttcggactgattgacaagctttcaatctcagtaagcgacaggctgaagcgaaaagaggtcatggcagcaaaagttttcatcatgatccgatttgcggactggacgaacataacaagaagcaagccccttctgaatccgaccgattcaaaagacgacattgcgaaggaagcgaaagcccttttcaggcagcattggcacggaagccctgtcaggcttttgggcgtgacgggaacagacctcgtcaatcgaaaggaagccgtcaaacagcttgatttgttttcctttcatgaggatgccaaagatgagccgatccaaaaagtgatggccgaactgaatgaaaaatatggaacagacctcatcaaaaaaggggtcaggattgtgaaaaaagaaagcaaaacgagcggaacaagctttaacaaagattttttccaagacgagagacaagatcaatagcttgaaaatgtaggtcaaagtgtggtaatttcaatttaaataaaaattaaactataatgctaaacgctttagaagggacgttagacatggcaaaacaacaaataggtgtagttggtttagcagtaatgggaaaaaacttggctttaaacattgaaagccgcgggttttcagtttctgtctacaacagatcaagcgagaaaaccgaagagtttctgaaagaagccgaaggcaaaaacgttgtcggtacatacagcattgaagagtttgttgaatctcttgaaaaaccgcgcaaaattcttttaatggtcaaagctggaacaccgacagacgcaacgattcaatcgcttctgcctcatcttgaaaaaggcgacattttgattgacggcggaaatacatattataaagatacgcagagaagaaacagggagctggccgaaagcggcattcacttcatcggcaccggcgtttccggcggtgaagaaggcgctctgaaagggccgtctatcatgccaggcggacaaaaggaagcccatgagcttgtcaagccgattcttgaagctatttctgccaaggtggacggcgaaccgtgtacgacatacatcggtcctgacggcgccggccattatgtaaaaatggttcataacggcatcgaatacggcgatatgcagctgatctcagaatcctactttattttgaaacacattgtcggtctgtcatcagatgagcttcacgaagtcttttccgagtggaataagggagagcttgacagctatctgatcgaaatcacggctgatattttcacgaaaaaagacgaggaaaccggcaagccgcttgttgacgtcatcctcgataaagcaggtcaaaaaggcacaggaaaatggacaagccaaagcgctcttgacctgggcgttccgcttccaatcattacggaatctgttttcgcccgcttcatctcttccatgaaagaggagcgcgtcaaagcgagcaagcttctggcaggacctgaagcgaaacctgccgctgagaacaaagaagagctgatcgaagcggtcagaaaagcgctcttcatgagcaaaatctgttcttacgcccaaggctttgctcaaatgaaagccgcatcagaagaatacggctgggatttgaaatacggcgatatcgcgatgattttccgcggaggatgcatcatccgcgcggcgttcctgcaaaaaatcaaagaagcgtatgaccgcgatccagagcttgacaacctgcttcttgacccgtacttcaaaaatatcgttgaaagctatcagggagccctccgcaaaacgatttctcttgcggttgaacaaggaattcctgtaccttgcttctcaagcgctctcgcttactttgacagctaccgcactgccaccctgccggccaacctgattcaggcgcagcgcgactactttggcgcccatacgtatgagcgtacagataaagaaggcattttccacactgagtggatgaaataagatgtaaagccgcaagctgaaaagcttgcggttttttgattttcggaaggatgcatgtttaagcggttgtgtggaaacctactcaaagagagagtttcaataaggaggaatcaacccatgtatccaagtttagagggaaaaacggtcgttatcacaggggcgggtacaggtcttggaaaagcgatggcactgcgcttcggtgctgaaaaggccaatgtagtgatcaattatttcaaggaagaagaaaatcccgaagagacggtggagaaaatagaaagcagcggagcgcgcgcgattgccgttcaaggagatgtctcaaaagaagatgatgtgaaagcgctgatcagacaggctgttgattcattcggttccgttgatgtgatggtgaacaacgccggggtggaaaatgaagtaccttctgaggatttgtctctggaggactggaaccgcgtcatatcaaccaatttgacggggatgtttctaggatgccgggaagcgatcggctatatgctcgaccataatattaaaggctcggtcatcaatatgtccagcgtccatcagcaaatcccgtggccgcattttgtccattatgcggcaagcaagggcggggcaaaactgctgacggaaacccttgctttggaatatgctccgaaaggaatccgggtaaacgcgatcggccccggtgcaatcgatacgccgattaacgccgaaaaattcgctgatcccgaattgaaaaaaggcgttattgaattgattccgatagggtatatcggaaagccggaggaagtcgcagcctgcgcggcctggctagcatctgaagaagcaagctatgtgacaggcctgacgctgtatgtagacggcgggatgacaaaatacccgggattccaagcgggaaaagggtgaaaagaaggcgggatgccttcttttcatcataagcccatgaaaatttacataagattaatagaaagcaatagtgctgtttacatagcaatgatagtgtaggtgtgtcaacaaaaagcggttatggagggagtacataagaatgggtttcttacgcaacagaatcgtcggcattacactggcaggagcagtcgctttaggatcggcgggaacaggcagtgcggcaatggaaacagcgaaaaaaaaggaagagccgaaggtcaaaaacgtgatcatgatggtcatggatggaacaagctcttctgcatcaactttggcacgctggtataaaggcgaaccgctcgcaatggaccagatcgtcagcggcggtgtccggacgtattcggcagaatcggcgatcactgattctgcacctgcagcaactgcgatggcaacgggacgaaaatcaaattcttcctatatcggtgtgctgccttcaaaagtgaacacaccaggagtcgagaaggtccgtgaaaaagatcattaccggcctgtagcaaacgtgctggaaggcgcaaaacagaaggggaaagcaaccggcatcattgcaacatctgaaattcagcatgccacgcctgccggctattccggccatcataaagaccgcaataattttgaagtgctcggtgaacagcaggtttatcaaaacatggatgttgtccttggcggaggaaaagaatcgcttcagccgggtacaaaggataaaagccgcaaagacggtgaagaccttgtaaaagtgctcaaagataaaaagtacgatttcgttgaaacgaaagatcaactcctcaagtcaaaatcgaaaaaaatctggggcgccttctcacagcgcgatctcgcgtatgacatggaccgccgcgcaacgcatccagagcagccgactattgcagagatgacgaaaaaatcgattcagacgctttctaaagacaaggacggtttctttttattcgtggaaggaagcaagcctgactgggcagcgcatcaaaacgatccgatcggcatgatcagcgatgtattggcgtttgataacgcggtgaaagaagcgcttgatttcgctaaaaaagataaacatacaatggttattgccgtctcggaccatggcaacagcggcatctccatcggcaacagcaacacgacgaaaggctatgacacaacaccggtatcagcctatgtcgatccgctgaaaaaagctaaaatgacggtggaaggcgcaactggcaaattaaaagacgacttatcgaatatcgaagaagcggcgaagctttacggacttgatgatttaacgccggcagagaagaaacagctgaaaagcgtgaaaaacaaaaaagaagcggcttcattatttaccaagctgctcagcaaccgggccaacatcggattcacaacaggcggtcatacgggtgaagacgtcttcctgtattcgtatggtccagaaaagccgcagggtctcgtcgaaaacaccgatatcgccaaaacgatggcaaaggcaatgggcttcaacttagacaaattaacaaacgaattatttatcgaagcaaaacaggcatttaaaaaagccggagccagcgtaacgatcgatcaaaaagatccggctaacccagttcttgtcgcagcgcgcaaaaaagcaaaagccgaaatgcctgtgaacaaaaacattatcagaatcaacgggaaggaatacgaactagacagcgtgattgttgaaagcaatggatccttctacgtgcctaaagaagcagttcagctattcaaaaaatacgccagataatttatttgaaaacccctctggaaagaagaggggttttttattgttcgaaataaatacatacatttatttttaaatgtctagacatttaaaaataaaaagatataataatagttgtgtgaaagcgcttttaataaagggaggagatcaccatgaagaaaattttactcgcatgcagctctggaatgtcgacaagcctccttgtcaccaagatgcaggaatacgcgcattcaatcggtgatgaggcaaaaatttgggcggtcggacaggaccaggcgaaaaaagagatggcagaggcaaacgtcgttctcatcggcccgcaaatgagctttttaaaaggcgagctgcagaaggaagctgaacagtacggtattaaggttgatgtgattgatatgctggcttacggaatggctgatggaaagaaagcttatgaacaggcgctaagcctgatcggggattgacgataatggaaaaattaaagctcgatgaattaacaggcgaacaaatttgctttcagctcattcttcacagcggaaacgcccgcagcaaggttattcagtccatcagggaataccgcgacggcagcgttcagaaagcagaggagctgctacaacaggcagaagacgatttgcagcagtcccacgatattcattttcaaatgatccaaaaagaagcgggcgggggaaaaaatgagttctctttgctgctcttgcatgccgaggaccatttgatgtcgacgctcacgatgaaggaactcgtttctgaattattggaattgttcaaagagaaaagtctatgattcgcactgcatggcaaaatcgaagggggataagagaccatgtttgaaaaattgagcaacctcttggtgccgattgccgggaagctgaataataaccggtatttaggcgtgctgagggatgcatttatgctggcttttccgctcaccattttcggatcgatcattgtcgttttaaccaatttgccgtttctcaataaaatgatgagcaaatccgcgcttgaaacgttccagtcggctttaagcatagcgccgagcgcaacgatcagcatcatgtccgttttcgtcgtattcgggatcgggtattatttgtccaaaacttatgaagtcgaagcggtttttggaggagtcgtcgctttggcatcgttccttctgctgactccgtttgtattaaacggcgaaggaggggaagtgattccgaacgtcatcccgattgacaggctcggtgcgaaagggatgttcctcggaatgattaccgcctttacatccgctgagattttcagattttttgtccagaaaaactatacgatcaaaatgcctgccggcgttccgcctgctgtagcaaaatcttttgccgcgctgattccggcggtgatgaccttgtccgtctacttggtgatcaatatccttgtaacccaagtgttcaatacgaatatgcacgatttaatttacaacctggtgcaggctccgcttgtcggtcttggaagcggtatcattccgaccttgattgccatatttttcactcagctgctctggtttttcggactccacggacaaattatcatcaactccgttatggatccgatctggaatacgctttcgatcgaaaatttgaatagctataccgcaacaggagaagtgccgcatattatcaataagcagtttatggaagtctacaccgtcggaatgggcggaaccggcatgaccttggccgtgattattgcgatcctgctgtttatgaggagcaagcagatgaagcaggtcgcaaaactcggagcagccccgggaattttcaacgtaaatgaaccgatcattttcggtctgccgatcgtcatgaacccgctcatttttattccgtgggtcatctcgccgatgatcgtcactttgattacgtatttcgcgatggcgtccgggcttgtaccgccgccgaccggggtcacgattccttggactgtgccgatctttatcagcggaatgatggcgaccaattcgcttgccggcggcattcttcagattgtgaatttagccgttgtctttatgatctggttcccatttttgaaattcatcgaccggatgaatatgaaaaaagagcaggagatcaatgaagcggaacaagaaaagacaacactaggactttaaaaggagattgatgacatgtcaaaaacagaaccgcagctagaacaaattcaataccgttttccaaatggcttctggtgggggtcggcggcttccgccactcagactgaaggagcggcggccgaaggaggcaaaggaaagaacatttgggatcactggtacgaaaaagagccaaaccgattttttgacggagtaggccctgagaagacttcgcgtttttacgagacttacagagaagatattcagctgatgaaagagcttggccaccactcttttcgtttctccatttcgtgggctcgtctgtttcctgatggaaaagggcggctgaacaaagaaggagctgccttttataaccgagtcatcgatgaactgcttgcggctggcatcgagccttttgtcaacctttatcattttgacatgccgcttgcgctccagcaaatcggcggatgggaaaacaggcaagtcgtcgatcactttgcttcatacgcggaaacgtgcttcaggctgtacggggaccgagtgaaaaaatggtttacccacaatgagccgatcgttcctgcagaaggcggctatctatacgattttcactatccgaacatcgtcgactttcaaaaagccgtccaggtcgcataccatgaaattctttcaaacgctaaagctgtcgaagcttatcgcagactcgggggcgacggcaaaatcggcatcattttaaatttaacgccgtcctacccgcgaagccagcatccggcagatgtaagagcatctgaaatagccgacgctttctttaaccgatcgtttcttgatcccgccgttaagggtgagtttccgcagcttttaacagatatattaaaagaagaaggctatttgcctgtcatggaagaaggagacttggagctgatcaaaaatcacactgtcgatctgctcggcatcaattattatcagccgagacgggtgaaagcgaaggagcacctgcctcatccggacgcgccttttatgccggaacggttttttgaccattatgaaatgcccggacgaaaaatgaaccgccaccgcggctgggagatatatgaaaaaggaatctatgatattttaatcaatgtcaaagaaaactacggaaatattgaatgctttatttctgaaaatgggatgggcgttgaaggagaagaacgtttccgcggcgaagacggcatgatccgcgatgactacagaatttcgtttataaaagaacacttaaaatgggtgcacagagccattcaggaaggagcgaatgtcaaaggctatcatctttggaccttcatggacaactggtcatggacgaacgcctataaaaaccgctacggatttgtatctgtcaaccttgacaaaaacggcgaacgaacgattaaaaaaagcggatactggtttaagaaagttgccgagaacaacggtttttaaaaagggactcgggctaaaagatggtcagttgggccatctttttatttccgcattaaaaccgatataatgataaagaaggtgttacaggctacagaatccttagtaatggtggttaaaacatgagaaaatacgaatatatttcaaacgaaatgaggaggcggattcaggaggaatactatccgattgatcagcccatacctgatgagctttctctcgccaaggaattttcctgcagcagaatgacgatgaaaagagccctcgatattcttgtgtcagaaggcatgctgtaccgtaagcgcggacacggcaccttcattgtaaaatcatcgattcagcagcttcccgtcagtgtaacagaccgcgaaaaccttgggctgaccaagcttcttgccaacaaacaaatcgaaagccgcatcattcaatttgacgtcgaattcccttcagatgaagtggcaaagcaattgtcaatcgaaaagaccgttccggtgtatcatatcatcaggctcagaaaggttgaaggcgaaccgtatgtcattgaagaaacgtatatgccttcgaacgtcatctctgaattaaatgaagacgtccttcacggctccgtttaccggcacatcaccgagacgctgaaactgacaatcgccggatcgcaccggaagatcagggcggataagtcgagtgcactcgaccgagagtacttggaatgcgcccctgacgatccggttcttgaagtcgaacaggtcgcttttttaaatacgggggaaccgtttgaatattcttttgcaaggcatcgctatgataagtttgtgttttcgagcgtccatattcggaaatgaaaaacctgcataaccgcgggtttttttgttttgtcatagaatcttccagcacgcttgtcctccgaagggattatggactaacatcgctgtagcggacgagaatttcagaggccgtgcgcatattcagaacgagcggctcataaaattaactaaataattagaaataaaacaatatattgacaactaatacatttttcatggtacgataggattgttatttgtccatcaagcaaagggggagaatgaatgaaaaagtggaaaagcctatcatggatggtattgctgctgacgctcgtcatgggattggctgcgtgcggaagcaacaatgcatcaggaaataaggacggcggatctgcgtcaaaaggatcaggaaactacagtctgctgacagggggaaccggcggtacatattatccgcttggcggtcagtttgcaaacctttgggaggatgccacaggagacaaatttacgacgcagactacaggggcttctgctgaaaacatggcaactctgcaaaaaggggaagctgaagtcgctttttcccagactgacattgccacttatgccatagaaggcaaagagatgtttaaagaaaaaattgagggaatcaaggcgattgccgccctgtatcctgaaactgtacagattgtgacaacagaaaaaagcggaatcaattcggttgaggatttaaaaggcaaaacggtttccgtgggtgctgcgggagcaggggtcaacattaatgccaagcagattttggaggttcacgggatgtcttttgacgacatcaaaccgcaaaacctgtcttttgaagaatcaaccgacggcattcagtcaggcgctatcgatgccgcattcatcacggctggaacgcctacaggcgctgtcgaagggctttccgcacaaaataaaatcaaaattataaacattgaagaagacaagcagaaaaagctgattgaaaagtatccgttctatgcggaggatacgatcaaaaaaggaacctacggcatcgggagcgatgtgaacacggtcgctgtcaaagcgatgctcgtcgcatccgacaagatggatgaggacaccgtctataaaatgacgaaagcgctgtttgaagccgataaaatcaatcatgcgaaaggcgagtttatcaagcctgaaaccgcgcttgaaggattgggcgatatcgacattcatccgggagcggctaaatacttcaaagaaaaagggatcgaaaaatcgtaaaaccaaggaagataagcgatgaataagcccgggcaatcgatagaccgttgcaatgaaacatcggtctatcgtttttctattcggcaggggatatggaaaaaatggggaaattaaaaatcataaaacggcttgtgccggcgctgatcattgccgtttttgcagcggcatgcctgattccttatcagaccgccgtcgtgttcgagaaagaggacagcggcgagatcatcgcttttcttcccctccaaaagaagaaaagctttgatgtggtctatacgcattccatccatcggacagaagtgatcgaatcgtatgtgtgggaaaaagggatgattcggcagaccgctctgacctatcatgatccggccgtcggaatgcccgcaaacgcagaacaaggtgaaaggctcgacatcaaaaacggcgtctacaccatttcgaacatgaagaggacctttccgttcatcgatatgcggatcggcagggtgagggcgaatcacaggatcaagtattcaggcgctgaacatgagttaaagcggtacatccgtcccggcacatggacaaggatgagtgtccgaaaactaaatgtcttgcaacaactgaggggagtgaagatcaatgactgagcagctttcggaaaaagatcagcaggaactgctggagaaatacgatcctgaagcgggaacgagaaagctcaaaggattgacaggggccattgcatttgccggcctgctcgctttttctttgtttcaattatacacagccatttttggcgtttttccggctcaaattcaaaggtccgttcatttagggtttgcgctcggtctgatttttttgctgtttccggcgacaaaaggtttgcggaagaccggcaaattcaaagtcgcctggtatgacgcaattttagccgtgttaggagcaggcgtcggcgcttattgggtcgccaattatgaaacgattgtgggcgggatcggattgatcacggaaactgacttttatgtcgggctgttggccgtcctgctcgtattggaagcgacgagacgggctgtcggactgccgattacgatcatcgccggcctgtttcttttgtatggcctttacggctcgtatcttccgggctttttgtctcacaacggcctgacgatggaacggctcgttcagacgatgtattttacgacggaaggaatcctgggcacgccgctcgctgtgtcctcgactttcatcttcctgttcatcctgttcggttcttttcttgtcaggacaggagtggggcagtattttaatgaccttgccgtagcgatcgccggacgaagcacgggcggaccggcaaaagtcgcgattttttcaagcgcccttcagggaacgatcagcggcagctctgtcgccaatgtcgtcacttccggatcgtttacgattccgatgatgaaaaaactgggctataaaaaagaattcgccggtgcagtcgaagcttccgcatctaccggcggacagctgatgcctccgatcatgggagccgccgcctttttaatggttgagttcatcggcggaggcattacgtactgggatatcgcgaaagccgcggcgatcccggctgttttatactttacgggcatctggatcatgacgcactttgaagcgaagcgcctcggcctgcgcggactaacgaaagaagaaatgccgaaccgcaaggaagtattcaaaaagatttatttgctgcttccgatcatttcggtcgtcgttttgttaatgtcgggcatcacggtcatgcatgccgctttgtattcgatcgttctggcgatcctggtcggtttgttcaataaagaaacgcgaatgggcgttaaagggattgtgctggctcttgcggaaggagcgagaatggcgctttccgttgcggcggcaacggcagctgccggcatcatcgtcggagtcgtcacaaagacgggtctcggcctcaaacttgcaaacggcctgctcgatttggcaggaggcgcattattgccttcgctctttttgacaatgatcgccgctcttgttctcggaatggggtcgccgacgacggcaaactatgtcattacgtcgacgattgccgcgccagccttgattttgctgaatgttcctgatctgtcggcccacttgttcgtgttttatttcggcatcgtagctgacattacgccgcccgttgctttggcagcatttgcagctgcgggggttgcgggaggagagccgatcagaacggggatcaattcagcaaagcttgcgattgccgcttttatcatcccgtatatattcgtcctgtctccggagcttctcatgattgatgcgcattggtatgaaattctctgggtggtctttaccgcattgtccggaatgatcgccatcggcgctggcatgatcggattctggatgagaaaagtgttctggtttgaaagaatactggcggctgccagcggtcttctgctgatttatccagaaggctattccgatatgatcggcctcggcatattccttctgctgttcgtccttcagctgatgtggaagcgggacaaaagccatccggaagagatgcaggccttgaaagcataaaaaaacagccttcaattgtgaaggctgtttttttattaaagcggccaccaatgaaagccgtcttttgcgagcaggtcgtcagaagctttcggccccatggagcccgccttatagttaggggaaagggttttgttttcctcccagttttgagaaatcgcatcaacaaaactccaggaaagcgcaacttcatcccagtgggcaaagtttgtcgcgtctccgtgcaagcagtccaaaatcagcttttcataagcttcaggcgtgttgatgccgtccccgcagttatggcagtagtcgagcttgatcggctgggcaaaagtgccgcctccaagcttccttgcgtttaaatgaagggtgatgccttcatccggctgaatatgaatcaccagcagattagggtgcatcgtgttgccgtttccgtaataaagattcatcggaatgtctttaaattggacgacaatctgcgttgattttttctgcatccgtttgcctgtccggatgtagaacggcacaccggcccatctgaagttgtcgatcagcagtttgccggcaacgaacgtttccgtattcgaatcttttgctacgttttgctcatcgcgataagccggaacatgtttttcgtcgacgactcctgcgtcatactggccgcgcacaaaaaattggtcgacatcgtctttttgaatcggacgaagggctctgagaaccttcactttttcgctgcggatctcttccgtgttcagcttgatcggcggttccatcgcaagcagcgccaccatttgaagaatgtggttttgcaccatgtctctaagcgcacccgatttttcataatatctcgctctgtcttccacacccaaatcttcacttgacgtaatttgaatgttcgagatgtatctgtttgtccaaagcggctcaaaaatcgcgttggcaaagcggatgacttcgatgttctgtaccatttgctttcctagataatggtcaatccgataaatttgatcttctgtaaaagcttcacggatttcctggttcaaggcttttgcgctcggcagatcatgcccgaaaggcttttcgataacgagccttgaccagcctgttgttgaagtgacaccctctgattttaggaactttgcaatcgttccgaaaaattcaggagccatcgctaagtaaaacatccggttattcggaatatcatatgtactttccagcttctctataagttcgtttaattcccggtatgagccggaatttgtaacatcaaaaggatgatagtagaagtgagatgtaaactcgtccacatccttttcgtttaacggaaacttcgaaaccgattgctgtacggtactgcgaaagtcttcatttgtccaagggcgtctgccgactccgacaaccgcgaattcattcccgatttgtccgttttcgtagagcctgtggatagaaggatatagttttcgttttgccaaatcccctgttgcgccaaatattacgataactgcttttggttccatttgatcttttttcaattaaacgtacctcactttattcgaagcataagtttattttcttcattttaaagctaataatcccttaaagcaaacatttgagatcgaatcgtatgaaaactttactgaaaacggtcagggtatttagttgcatagcccgacgcgaggccggcgtttcttttttccaagacttcctgtatgcttgtgatagatgaagtttttagcaggaggaaaggatattggagttattatttttaggaacgggagcgggcatccccgcaaaaacgaggaatgtcacatccgttgcattgaagcttttagaagaaaggcggtctgtttggctgtttgactgcggggaagccacacagcatcaaattctacatacatcgatcaaacctagaaaaattgaaaagatttttattacccatcttcacggcgatcatgtatacgggcttccgggtcttgtcagcagccgatctttccagggaggggaaggcccgctgaccgtatacggaccgcaaggaatcaaaacgtttcttgaaacggcgcttgacgtatcggggacgcatgtcacatatccgcttgtgattaaggagattggagaagggacagtctttgaggatgaccagtttatcgtgacggccagaagcgtatctcacggcattcccgcttttgggtaccgcgtgcaggaaaaagatgttccgggcgcccttgacgctgaagcactgaaagagatcggagtctcgccgggccctgtttatcaaaaactgaaaaacggggagacggtcacattggaagacggccggacgattcatggggcagactttatcggaccgccaaaaaaagggcggattgtcgccttttccggggatacgaggccatgcgagaatgtgaagaggcttgccgaaaaagccgatgttctcatccacgaagcaacatttgcgaaaggcgacagggagctcgccggagactattatcacagcacttcagaacaagctgctgaaacagcgcgggaagcctgtgcaaaaaaactgattttaacccatatcagtgcaagataccagggggaaaacgtgcttgaactggtcgatgaagcaaaagcgatctttcctgataccgtggcagcttttgacttttatgagcatgagatcaaaagaacttaatgggcagttataaagcttctttgttccgacaatccgggacgggaagctttttttgttgacacggttctaaaatgatgtataataaagcgtaatgattacgttttattaaggaggacaacatgagagtaaaaattacattggcgtgcaccgaaacaggggaccgcaattatattacgacaaaaaacaaacgcacaaatccggatcgcctggaattgaaaaaatattctccgcgtctgaaaaggcacacgattcaccgtgaaacaaaataactaaaaccagcagactgtctgctggttttttgtttaattggcggcttgataggcgtatgtttgctgctgtgccgcataccacacatcatagatcgcaagctggacgatgtgcggctcatcatgatggatcaaatgcgagctgtttttcgcctgaatccagccgctttgatgcgatagagacagcagtctgctgtgaagcttcagccattcttgatgagcttgcttcgccgcctccgtcctttttcccgccgagaggacgagcaaaggaaccgaaccgaggtgtttcttttcctgcttcagcatgtccaggctttgtttaaagtcctcatgggacccttcgatcgaaaactgtttgacataatcttcttttaatgtgtccggaagtagcggcagcactttttcctcctgatcttcacaagcgggatcaagcagcaccatgccgatgacttcatcgctgtaccggcttgcaaacagccttgcaatgacggcgccgaacgaatgggcgacaaacaggtagggcggtttgacgtctgctgctgcaagcagcgcttttagttctttcaccatctgatccgctgttcgtttgctggtgctcggcccgcttttgccaaggcctgcacggtcgtatgcaaacaagccgagatcttcgtctatatcggataaaatgggctgccaagtcgttgaagaaaaaccgtagcccgcttcaaaaataatcgttgcgttcttttttccttttctctgctttgtataaaacatgcacccttcaacagtatatattctttccgttatggtcatagaggtcatcctctctttgtatatggtgttctattaggaaagacgcacaaacaaggatgttcgtttctcacgagttgaaaaaaagaaatatcccgccataaggcgggatattaagtttaccaggctctgtcgtactgaacaggcccttcaatttttgtgttcaactgtttggcagcggttttcggccagtatggatctctcagcagctcccgtgcaacgaaaatgagatcagcgcgtccattttggaggatttcctcagcttgaaggccactagtgatcaatccgacagctcctgtctgaatctcggcttgagcgcgaattgtatcggcgaagccgacttggtagcctgggaagacgttgatatcagcaggcacaacagcaccggagctgacatcgatcaaatcaacgccctgttccttcatccatttggcgaaaccgacataatcggcgacatcaaggccttttgttttgtagtctgaagctgaaacgcgtacgaataatggtccggcccagacttcttttacagcgtcgatgacttcgcgaagcagcctgtagcggttttccggtgaacctccgtattcatcctcgcgtttgttggaaagcggtgataaaaattcgttgatcaagtatccgtgggctccatgaatctcgatgatgtcaaagccggcggctttcgcgcgttcagctccttttttgaaagcctgaacggtttcttttatgtcctcttttgtcatttcaacaggcgttcgcgaattttcgtcgaaaggaatcgctgaaggtccgtagattgtaccttcgacctcggcttttcttccggcgtgcgccaactgaatcgccgttttgctgccgtacgtcttgatttgtgacgtcaatgcagcaagtccgtcaatatgcgcgtcatcccatatgcccagatcctggtcagagattcttccctgcggagtgacggcggtagcttctaccatgattagtccgacttgtccgacggcgcgggagatgtagtgggtcatgtggaaaggctgcacttttccatccttttcatgggaggaatacatgcacatcggcgacatgacaatccggttttttagtgtaactccttttaaactccatggtgtgaatagttttcgattactcaaattttttcgcctcccgtaagttttcgcctcgattataccaattctgcccattctcgtcatataaactgctcaagtcatttccatatgtaagaatgttcagtacaataaagttgtacacattctattttttactaaatatgatatcacatacatttgcggaaaacagtgaaagagggggcttgctttgtgaagtggcagacagtggaagaactgaaacggctgctcatttctcttgttcaatacgaaagcatctcaggcacggccggagaagtggcgcttgcgaaatatatgcatgatgtcttaaaggaccgttcgtactttcaaaagaatcctgaatacttaaagcttcacccgatggaggatgggcgctattttttaaccgccctcgtcaaaaaggaaaagaaatcaaatacggtgctcctcttgagccattttgacgtggtcgatacggcagactacggagaattcaaacatatggcatgcaaagtcccggaactcatggacctattaaatgataaaaaagaacttttgcctgaacgggtcaaaaaagacctggaaagcggcgaatggctgttcggtaggggaagcatggatatgaaagcgggtcttgctgttcaattttctatgctggaacgggcgatgaacggagaatttgacggaaaccttctattaattacggttccggacgaagaagtcaactcgcaggggatgcttgaagcagtacctgtactgaaagctttagaaaaagaatttggccttcattatacagcgtgcttaaactgtgagccgatgtttgaaaaacatccgggtgatccgaagcagtacgtctattcaggcagcatcggcaaagcgcttgccggatttttctgcaaaggggttgagacgcatgtcggcgagccgtttgcaggggtgaatgcgaatctaatggtgtctgagatcaacaggctgctcgaattaaacgtcgactattgcgaagaagcggacggagaggtgacgcctcccccggccaatctgatgcaaaaagatctgaaggaggcctactcggttcagactcctcacacagcggtgtcgctctttaatgtgctgatgatgcagcgttccgccgccgagctccatcgcatgctgctcgacacagccagggaagcggccgccaatattcaaacaaatatcgaacgtaaaacggccgaatatcagcggtttgaagccttcacgccaattaacccggccgtttccgtgatgacgtttgaggagctgtggaacaaagcacaggaaaaagccgggaagcccgaggcggaacgcatcctcaactttgcatttgcgaacaggggggagcttggagaccgcgacttttcaacgaaaatcgtctctgaattggcttcactctgcaaagaagatgctccgatgatcgttctgttttacagtccgccgttttatccggctgtttcttcaaaggacgatcctctgatccgaaaggtgatgagagaagtgaagcagtatgcggccgacaggcacggaattgaatttacagaagtccaatatttccccggcctgtccgatttaagctacctgcagctgcaaaaacagtcagtcgatgcgttcacatccaatatgccgctttttcatcacggctattcacttccaaaaggacgcgaaaacgcactgtttgtgccggtcatcaatatcgggccggccggcaaagatcctcacaaatggacggaacgtctccatgtgccgttttcatttggaaagctgccagatatcctccggctcgcgatacacaagcttctctaagatacgggaccgcttgaagaaaaatcgggaacgagcgaaaacgctgttcccgacttttttaaattttggcggcaaacatatccctgagttccgcagaacgattcgccgcttctttgacgcaggatatgacggtctgttcaaattgatggtcgtcaagcatcctaaggcctgcttccgttgtccctccggcgcttgtgatctctttcctcatgacagaaggatctctgccggtttcaagcatttgagccgctcctgccatcatatcgataatcagctgtttcgccgttttttcaggaagccccagctcggcagccgacgcctgcagggcttcgacaaaccgataaacaaaagcgggcccgcttccggctacggctgtcacagcatcaagggcagattcctcaacgattgtaacgctgccgaccgtcgcaaagaggtcagccgcttcctgcatctgctctttcgtgacaagcgggcttgccgcaaaggctgtggctgatttttgaatggcggccgatgtattcggcatggctctcacaacaggcagctcaagcccggcatagtgctggatcgtatgaatcggaatgcctgcaagaacagagatcagcagctgttcttttcgcaaataggggcggagtgcggctattcctcctgccgcgtctttcggcttcatcgccaaaacgagtgtatccgaccgggcggcgacttttgccgtatctgcttctccgcataccccgtaagtctcgcttaattcacgaagcctggccgtattcgactgattcgtaacgaatatcgcctcaggttccattgcaccgcttttgacaagccccttaatcatcgcttcagccatcgaaccggctccgataaatcctattcgtttcattttgattcctccttctaaaaacaaaaaaacctttccgtcttcgcaaaggacgaaaaggtttcgcggtaccaccttcattagcatatacatgctcagctcttgccccgtaacgcgggatacgtttaggtttgcctaagcgctctgagggcaggttcaacaggcaagcgggctgtgaaatctttcagccgtggatttcactctctttagccattgctcgtttactattcctcttcatcgcgtcttcattcattcaccttcatatatttgttgttcattatgctatgaggaatgctgaaatgtcaacaggcatttgaggcaaaaatgacatgcgcgggagaaaaaggtaaaatatgatcaacatcaattcgcaggatgaggagaataaaacgatgaaagacgcaagaatcattcctattgcactgccgactccgtttgcagtcggagacgtcaacatttatttgctcagaggcgaggcgctcactctggtggatgccgggcccaacacaaaggaggcggcagccgttttgaagagcgagctggccgaacagggactgtcattaagcgatatcgaccaggtcgtcctgacccaccatcacgctgatcacgccggactgctgaacgaattcccggcagaggtaaaaatcattggccatccgttcaatgaaccgtatatcagtcaaaatcccgattttattgaaaaacaaaagtccttttttacatacctgtttcaacgattcggcgttcccggcgatatgaagccgccaggccataccataaaagcgtcgtaccggtattcatgtaatcggacattgacagagaccgtttcagaaggtgggcaaattgaagggcttgacgggtggcgggttcttgagacgcccggacatgccgcttcgcatattgtcctttataatgaagaacttggaagcatgctcgggggagacttgctgctaaagccgtcttcttcaaatccgcttctggaagtgccgcaaaaaggagggaaacgcccgactccgctgctggattacctggaatctctcggcaggctgcaggagcttccgcttcacatgatttatcccggccatggggaggaaatcacaaaagtgaatgagcttgtcgccaaaaggctggaaaagcagcgaaacagagccgaagaggtgtaccgcatcctctctgaaaaaccgcattcaccttatcagatatgtcgaaaactgttccctgcagtctatgaaaaagagctgttcttaacactgtcagaaacgattgggcagcttgacgatctggaatcccaggggaggatcggagttgatgcggccgatggaatcgattactattatgcaaagtaggtgacgaacatggagcagaagttgaaagcgcacaaagtgatgattacaggagcttcaggagggcttggcgaacggatcgcatatcatgctgcaggggaaggagcggagatcattctggctgcgcgcagaagagaccgcctcgatgctttgaagcaaaacatcgcggataaaaccggcgcaaagtgccgtataatcgtattggacgtcagccggacggatgaagttgaagcggcgtttcaagaggccggtccggttgatattcttgtcaataatgcggggttcggcatttttgaaagcgcgcttgacgcttcccttgaagatatgaaagcgatgtttgaggtcaacgtattcggtctgatcgcctgcacgaaaatggcactcccgcatatgatcaggcaagacaaaggccatattatcaatatcgcttcacaagcgggcaaaatagcgacgcccaagtcaagcctttatgcggcaacaaagcatgcggtgctcggatattcaaacagcttgagaatggagcttgcagaaacaggggtcaacgtgacaacggtcaatcctggaccgattcaaacagactttttcaagacggcagataaaaaaggcgattatgtaaaaagcgtcgggagatggatgctagatccggatcgggttgctaagaaaatcgtctcggcaatgatgacgaacaagcgcgaaatcaatcttccaggctggatgaacagcgtcagcaaactctaccagcttttcccttcgctggttgaacgaacaggtcgaagcgctttctataaaaaataatggtttctcgaagaaaggaacggaatcatccgttccttttttgtttgcatttttttagcgatgccccctgcagagaggctcaaaatatcatataaaaacagggagactttgtccctctgcaaaacccggcatcgaacctctgcttccttctttaagcgctgcttgatctgatggcacctgtccagcctgaggcaattgatataaaaatacggcacgccgaaagattccgtgcttccgggaacacgtgccggccgctgatgaaaaataaggtaaaggtcgctttcgttttgccgttcttcttatataaaatggcaactgggtgacgaaagggagtaatattttaccatttattgaaattctctcatcccggccgaaacatgatatcacgtgatactcgcaacaaaatacacgataaaaggagtttcttaacggtgcaggaagaatggaacccattgatgaaaaatcgttgcatcatctggttagtcacggggatttgcttaacggtcatctttcaatttccgctgaaaagcgtcgcttcatccgcagacaaatacgccaattttgccgagcttgccgaacatgaaacagaaggagaagattaccaaatcgaatacacagacatgggcaccgaactgttgattctttcaccgcacggcggaggaatcgaaggaggtgtcagtgaacttgtccgcgccttcagcgccgattattccacttatttatttgagggaatcaaaccctcgcaaaactgggatctccacatcacaagcaatcattttgatgaacctcaggccctcaaagcggtcaaagagcacagctatgtgctggcttttcatggatatcatgacatcgttgaacatacgcttgtggggggaacggatacaggaggggcgaaagcgattgtcagagcgctgctgaacaaaggtttttcggcggagctggtcagcccgagccaccggcttgcaggaggaaatcctgaaaatatcaataatcaatgcaaaacaggtcaaagcattcaattggaaatcagcacgcctcaacgagaggcttttttttcggagttcggcctgtggacgcgggcaagttctaaaaatgagacgtttcaagcgtatgtctcagctgttaaagaagttctggaaacgaggtataaataagcattgtatatttgggccacattaaaaccaaagacatgaagagggtgagcaggttgatctatatatacaattgttacggcggcactcattcatctgcacttgccgctgcttatcatctgaaaaagctcccattcagcagaaaaccaacaagaaacgaaattttaagcaccgactgttttaatcaattaagtccgaaggaaatgggaaaattaatctttcacggacttgatgaagaaggcaaccaggtgtacacgatcggcagaggatcgtcaaaagctgtcattccagccatgcgaggcgttctcgagctgtttgaaaaaaacgggaaacttcaggagaaagtcattttttcaaacacgtctccgactgtgccaatagcgatgacattcggcggtttattttcgaggaggctgaaaatcgatccgatcggggttcctttgctggtgcttggagcgcagcaggcataccaagacatcatcaagcttgtgcagcaaacaaaaaaccatgcaaaaacgacttcttcgatgatcgaggtactcgataacggctttaaaggatagtggccgaaggatgaatataaggaatttatttgaaaaaacaaggcgttctgatcggtgggatgccttgtttaataggaatgcctttttccaatgaatagaggggaacacagtttcattgcagcggttgttgacttttaaaaaagatcgacattcacagaacggaaagcgggaggcgcatcaaaacgcctcccgcttgcttgcgctctaaagcccgcgtctgtaaaagaatcagccgctcgttcacgctctgttctccaaaagcggatcgaagcatgttcatatttcagacgccagctgcacgttgtttattttttgacatagcagcggtcttggtacatcgtttcacatttttcgcgtgtgacatctgttttaccatttattactctgtaaacatcgacatatctctcgccatttattaccttatattcgtattgcgcaccgggatacttgtccctcacccatattaattcaggcagtgtatccgcacttacgggcaatccagacactaacaaagcacctgcaaatgcaaccgctccgactgcttttttgattttgttttgaaacatccctaacgacctcctaaagattgtttttttgcctatgacatcataggcatgtacatcctatcactcggctggagaaaaaaatgtctaattgtgtagaaattcaataaaattcaaaaataatacacaaatttacattttaatcagaggtaataggtgttcgcctaagaacaccctcgggaaaaatggtaaaataagagaatttgattgaaggtaaggaaaaatatgttataattttacgagagggaggaggggatagtttccaataggtaacgatgaaatggtccattttgctaggaatctattttttcatccattaaaataagagaactcggaccttaaattgttttggatgtggcagtagcttatggatggcagctgaagacgtacatacaaatatttcaaaaacacggagggaaacgaaatgaaaaaagcgattttagggttttctttgtctgcggcgctcctggttccatcctcattcgctgcggctgctggggacgggcagctgacaagcgagcaaaaggaactgcttgaagccaagacagaatacgttcaatcacttcctgaacaggcatccgttcaaagcggtgtgacggcttatgcaggaaaaaggctgacaattaaaagaggaagcttcctcgcctggtcaaaagattatatcgactggtactacaacggcaaaaaagtatcgaaaagcagcggatcgcaggatgtcggctacgtctttccgaatgtggtgagggcaaaggggattaaaaggtattataagtcatcagggcttcacaaatggagagcgaaaaaaacgctgagcttcggaaccgttacaccgtggggagatgttgaattggccagctcaacctttacagacagaaggtgggtcaataaaaaaggaaaatacggaaacgattaatttactataagccatttcatacaacgctgctaaaagactatttagaaattaatggcagcgttgtataatggagaatgttgcaacaccatcctgatgcgagaaaggatttttcaaattgatcaaaatcgatgacctgacgaaatcttatggaagcaaatcggtattcaaccgtctcaacatgaatattgaaaaaaacaaagtcacctttctgatgggagaaaacggcgccggaaaaacgacgctcttgaaatgcctgctcaagcttgaacctttcgaaggcggcatactgtacgacggcgagccgcttgaagcagtcaggagcaaagtccacgtcatctatgacgattccccgttttacgatcatctgagcggctatcaaaatatcaaactactgatcaataaacctgccggcaaagaagagcttgaacaattgtcgcaaaagtttctcggcagggagctgctgaaaaaaaaggtcaagacctattcatacggacaaaagaaaaagctggccttaatgatcgctgcattaaacaaaccgtcattcttgtttttggatgagatatcaaacgggcttgactaccggtccatgatggagcttcaggagctcatcaatgactggtcaagcaggatgacgattgttgccgccggccatcagtttgagttttattcttcaatcgtcgatcaattatacgtgttgaaagacggttcagctatccacatagacaattttaaaacgaatggagcagaattgggcgatgtctataaagaatatttataatattttcaagaaagagcttgcatttcaatcgtattctaaattgctcatcattttattgcttcctctattattcatttcatccggatacatatatgttcactataaaaatacaatggacagctaccagcagttcaaaaagactgaaaatgaatataaagaactcggcatcgatattaagcaggcgctggagtcgcccgtcaaggtgaaggaaggtgagctgaaaagcgaggatggcgacggagagatcgtcgaaaatattttaaggttcgactatgagaatttcgtcttgtccctccatcacctggagccgaaacagtcagtcactatgacgcttgagctgatgggcttcatcatttttcccttggctttcacgctgtatgccatctatatctcctcatacgacatcagattcaagacgatgaaagtgaaagcggtcagccatgattggaaatccgttctgtttgccaaacagtgttcggtttacatggtgatggctgccgccgtgatcgccgttgtatgtacggcatatgtgtcaagcctcgtcttttattcccttgcttcaagggatataccggtcggcgagttcacaatacccgctgtttcaaaaagcaatatcctgcttcagctcgctgtcgttctggcggtcagcttcatcttttcgacgatcggattttatttgggcgtcctcttcagaagctttattacgcctgctttgctttatgtcgtttacagcctgctgatccctgctttgggcaggttcgatttaaaaaacctgctgtctaatctcgggcatgcggttttcagtttcagcggcggctttaaactgtttacaccggtgaaggtggacatgattccggtcatcatcattttagccgcatccgtcggcttgctgtctgcggtcacttattacatggcgcacaggcaaagcaaatatgtcgtttgaaaaaagagtgcgggcgcctgcgctcttttttcttttgcaaacgaaggacacccgttggctcagggttgacaggaaggagagccattcgcatccgccatgcaaggaaaccggacccacccgtctctggaggaagacggtttttttgattgaaacgttgttcctcgtaaatattcgaaaaattctatataataataaagcggtctcagaattcatgcacttttttaagtaaacagcgtttgaacagagggcaggtgagaatagtggcgaatcaggatttgaatttgcacacgttatatacgagtcatacccgtgatgcctgggcaaatctcggcgggcatatgtcggtaaagatgaccgaagaggaagtaaagaagcttgaaggtttaaatgactatctgtctttggaagaagtcgaaaccgtttatgttccgctggcgaggctgctttatttacaccgggcaactcaatatgaacggaacacccgggtaaacggttttttgaatcatcctcacgcggccaagattccgtttatcatcgggattgccggaagcgtcgcggttggaaaaagcacgacggcccgcatcattcagactgtgctctcccgtttgcaggaacggctgaaagtcagtctgatcacaaccgacggttttctttatcctaatgcggttctgacagaaaagcagatgatgtcgaggaaagggtttcccgaaagctatgatgtcaaagcgctgcttgagtttttgaacgatttaaaatcaggaaaggaaattgtccacgcacccgtttattcccatctaacgtatgacagattggaaggggtttatgaaacggtagaacaagcggatatcgtgatcatcgaaggcgttaatgtgctgcagacaccgacgatcgaagacgaccgtacaaaaccgcgggttttcgtttccgatttttttgacttctcgatttatgtggatgccgaagaagacctcattatcaaatggtatcttgaacgctttcgcatgctcagggagacggcttttcaagatccgagttcttatttccataaattcaaagacctcgcggacgaagaagcggaccatatggcaaagtcaatatgggagaccgtcaaccgtccgaatttgtatgagaacattctgcctacaaaattccggtctgatttaatcttgagaaaaggcgaaggccacaaggtggaagagattttggtcagacgggtatagaagaggaggcttgcatgatccatcatattgaactgtacgtttcagatttggaagcgtcgaagcgcttttggggctggtttctcggggagctcggctatgaggtttttcaacaatgggaaggcggcatcagctggaaagcaaacggcgcctatctcgtgcttgtgcaggcgaaagagcagtttatcaaagcgggttatcacaggtgccgcgtcggcttaaaccatcttgctttttacgcggcatccaaagagcaggtcgacgaaatgacaatgaaactgagagagcggggatgccgcattttatatgaagacagacatccgtttgccggcggaaacgggcattatgccttgtataccgaagatccggaccgcatcaaagttgaacttgctgccccttgaggcgggcggcagccgaaggccggcctttgttcgagccggcctgttttcaattaatgctgcatcgtttttttcgaacttaaattgacttttgcttcatccattttgagtttccggtaggctgctaccaggaaaggaacgccgcaaatggtggcagcagacaggattgcaaaagtgaaaaacggtttttccgctccaaaggtgtccagcagcattccccccgcccaagggccgaccacgcttccaagctgggtgaagcccatagccccaaagtaagtgcctttcagctcaggccgggcaatccggtcgaccagtaaatccatcatcgaaaagagaagcacctccccgatcgtaaacacgataatgatcaagacaatggaccatagatcatggaaaaaagagaggctgaacaggcttccactaatcagcacatttcctgcaatcagcgataaaatcggtgaaaaccgtttggcgatatgtacgatcgggtactgtacggcaagaacggccaaggcattcagcgtcagcatcatgccgaacactttcgtcccgtcttcaatgaacgggctggccgccatgtattgtgcaagcgtcgatgtgaagtgggaatatccgaacaaacaaagaatcgaaccgattagcgtaatcgtaaatacccggtctgtttttgtcacctccagcgcgtcccgcacttttatacgcttattacgctcagctgccggtacggtgtggtgtttaaattgaatgaccagcaccgccgcataaataaaataaatgaaagccgcaatgaaaaacggcagcgtcgttttggaagatccgagatacaggcctaaaagcgggccgaagacgacgccgaggttgatcgcggtatagcggagattaaagacgaaaaggcgcgtttcgggtttggatacgtctgaaagcagcgctcttgaagtcggttcaaacaaagcgcggcataatccgtttaaggcattcatgataaagaatgtccagacatgatcggcgagtgcaaaaccggcgaacacgaacgtccagccgaaaatcgagacgagcatgatggttttccggccgaacctgtctgataagtacccgccataaaagcttgccgcaattccgatcagagagctcgctgcaatgacagctcccgcaaagccggaagaggcgcctttcacttgtgtcaaataaattgctaaaaaagggatgctcatggctgttcccatgcgtccgaaaatggttccgacaataatggtccagctgagcgggtggatgttctgccatttttgtttcatgataaactctccgttacgtttttatttgtttatcatacatgaaacagatggcggtgaatagaggaatttctaaatgctgggtgataaaaggcttcctgtacaaaggaagccgcaaagaaaaatcgttttatgatgagaacaagccttgatttgtgacataatcatagatgacatcctcgatatgggcatgcagcccttcattcggctcctcgatccgcctttcctgcaaagccagcttcaggatttctttttcgccggggctgagcggatcggttgcaacattgcgtccgtactgcttcagcgcctgtccgagcattttttcaatcagtttctcatccatttgtcttctcctttaggagcgctttttcttttatcttactaagaaaaactgatgttctcaagagagcattcaatttgaatcatcaaactgaataaggcgaaattccgaactggaatggtcaaccatgtcaccttctttccaaagaaggtgttttttattgctttccgccaggattttctttggataaaattacgcctggaaatcgaacgtatattcggagtatagtattcatacactaattgtgcgaacatcagttcttctggagggagagtatggattacagtcaatatccgtcgcgttcggttttgtgcgttgatatgcggagcttttatgcaagctgcgccgcagtcctgctcggacttgacccgatgacttgcttcttggcggttgtcggaaacacggagcggcagggaagcatcgttctcgctgcttctccggctctgaaaagagagttcggcgttcaaacgggaacaaggctttatcagctgccggatgatccgcgcatcaagctggtcaatccgaagatggggctgtttgtccgtgtttctacagagctcacccggctgttctgccgctatgtgccgcctgatgccattcatacgtacagcgtggatgaaagctttattcaggtggacggtgttgaaagcatgtggggagacgcccgaacgattgcgatgaaaattcaagatgatatggaaagggagtttggccttccctgtgctgtcggaatcggaccgaatctgctgatggcaaagctgtgccttgaccttgaagcgaaaaaatcagcaggcggggtggccgtttggggctacgaagacgtgaaaacgaagctgtggccgctgtctccgctgcgccgcatgtggggaatcggctccaggctggaaaagacgttaaaccggatggggatttttacagtcggccagctggcgcactatgatctcagtcggcttgagaaaacattcggggtgatgggaaaccagctctattatcacgcttggggcatcgatctttcagcgattggagcgccgctcatggaggggcaggtcagctatggaaaaagccagattctgcttcgcgattatccgaatccggaggaagtcaagcatgtcattcttgaaatgtgtgaggaagtggccaaaagggcgcgcgcccaccgccaggcgggccggaccgtcagtctcggcatcgaatacagccgcgatgagcttggcggcggattttaccgttcaaaaacaatggaaagcccttcaaatgtcacgcttgatctttaccatacatgtctggcactgttcgagcggttttatgccggcaaaacggttcggaaaatttccgtctctttgtccaatattcaagatgacaccaatatgcagcttgatctttttcgccccgatcaggaaaagaagcggcagctcgggtatgtgatggacggcatcagagaacggtacggctcaacagcgcttttgcgggccgtttcctacacaaacgccgggacggcccgtctgcggtcaaaattggtcggaggccatcaggcatagaaaggagaatcatttatgcttcgcgacagaggcagtatcaaatgggtttccatgatgctgcctgagcacgtggaattgctcagggaatatcatgaaagctttcaaaaaatcaaaaaaccgatcctggatgaacaaaaatatgaagaattcaatgaaatcatttgtgaagcgatggcagaaaacaggtttttgcaatttgcttattaccggcagggggaagtgaaaacgctcgccggccggattcactatgctgacgctctgaaaagggagctgcggatcgtaagccgggcggatgaaatttgcattttaaagatagaggatatcattgagattgaatacgattgtcgtttataatggaatcagtattcggaggtggataaaatggtaaatgacattcatttgccgactgcagcgtctcatgcaaagcctgttatcttgaaaggcgatactttgcatgaggcggggttataaacaaatcgcctgacagagcaaggtatcatttctgatcatccggctttgcaccttattttaaaatatagatctataaataaggagctggcagaaatgaagacaccttttatcagaaatgaccaatataattttattaagtttcaaacggacagcctcgtccagggacatgcgaacatcaatgacgaaaacgtccttgacgctttgaagtgcaatgcgctggatcaagtgttcaacctgtttcctgatctcagcagcgatcaaaagtctttgctggagaagctggcagaagtggaagacagcggtgaagcggtgcgctttttagctgaattaaaacttcatgtgattccatttcagaatgtaacggtaaagactgctaaaaagctgttctctaaagtgaaaaaactaaagacgcccgaatttgagcagatggatttcagcggatattcctacctgggatggaacgatgcaggatcaggcaggaaatacatgattgtggacgtcggcggaaagctgaccggaatccacggcaccatcaaatccagcaataaaaaaggaatctgctcgatatgcaacaggaccgaagagatcggactgttcatggcccgcgtgaaaagcgggaaagaaacctatacggacagaggcaattacatttgctgtgacagtgaaaaatgcaatcaaaatttgatgacgctggatcatctgaaccatttcgtcgcacaattaacgaaagaataaacgtaaacaccccggctaaagcttagccggggtgttttaatgatttcggtctttggcctgcctctctcgcagcactgcgctctccgaaaagccgggtggtcagcccgggaacagccatgcataagaatacggaacgcccaaggctgaataaaagaaaagcgagccacagcccatggtttccgaaagcggggacagcggtaaaaaaggcggccaggaagacgagaacagccaaaaacattgaatttctgaccgggcctatttcggtggcgcctgtgaaaatcccgtaaaaaacgagtccgaaacttgcggccaaaggaaagagagcgatccaaacatcgtaagttttcgctgcttccagaacgctttcaagcggtgtaaacaatggaaggatcgcatttctcaagagaaagtagccgactgaaagcagcgcggccgagatcagcgaccactggatcgaaagggaaagcgtacgggaatagagatcccgatccattcttccaacggctttcccggcaaagatgctcgatgcattggcaaacccgtcaaaaacataagccatcaaataatgaatttgaatcaagatcgcatttgcggctaaaatttcagcgccgaagccggctcctttagccgtaaataaattgaaaaccgtcaaaaggcacaatgtccgaatcaatagatctcggttgacaaccatcatttttttaaacggtttcgggtcgaataaaagcttgacggacggcagcttaaacggcatggcggcattcgttttcacaagccagcagccgatcaggcagcccgtcacatccgaaatcaaagtggctagagcgatgccgtatacttccatgtgaaagacgtagacaaaaacgatgtcaagcacgatattcaagacgttcatcgaaatctgcaaaagcaatgtcactttgattagagacattcccatcagccagccgagaatgcaatagctgattaaagcaaatggagctccccaaatcctcagcgaaaaatactgcgaggcgaattcagcggtatggcggtcgggctgtatgagcgtcagcgctgcgtattcaagcggtttttgcaagatgatgaacatcagtccggcaaacagcgcgatgaaaacgggccgggcaagggccaaaacgctctctgatctgttttgggagccgagtgcggccagatcgtgggaaataaataaataagaaaggcccatagcatcctgcaaatctttgagaagatccaggatcttcgcctgactggtgacatccaggcttgctgtaggctcatcaaagatgattaaagacggatgagtgctgatggctctggcgatcaaggcccgctggcgctgcccgccgcttaattcgtgcggatagcggtcaaggaggcgcgagggaaggccgaccattgagaacagacgctcagccgtcagacggcggctgcctcggaagtcccttaaaaatgacggcatgtcttgtttggaaacatcaagcggctccataactgaatcgataatattgagctttggattgaatgatgcagctggattttggaaaacagcctgcagttttcgacgcagtctccgggtctcttttttgtttatgccggtaagcggatgttgatgaagcctaatctctccgtgatcgattttttcgagcagcaaaaggcagcgtgcgagggtgcttttcccgctgccgctctcgccggcgagcccgaggcattcgccttttcgaatggagaatgatacgttgtcaaccgctttgtggccgcaagcgtaatgttttgtcagattgctgacaaaaagaacggtctctgcagaatgggtcatcacgcacctcctgttcccgccagcaccgcttcctttgtttcaggcggggctgccgtcagccttggcggaggatttttcagcggcgggatggccgcgaataaacacctcgtatattcatgtgccggctgtctaattaaatcagcggttaagccgctttcgacgatttctccgttttgcatgacggcggtttgatcggcgtatcttttgacaagccgcaggtcatgagtgataaaaaggatggcgcagtttgttttggcgcgcatcgcggcgagctgttgcaagacgtccgcggccgtgatgctgtctaaagccgtcgtcggttcgtctgcgatgagaagcttggggcggagcaccatcgcttgagcaatcgcggccctttgcagctgccctccgctcaattgaaacgggtagctttcatatactctgttttccggcagagaaacctcccgaaaagcatggagaatcgcttctcttcgcttattcttagaccaacctgtatgcgttttgaccatttcgtcaatttgtttgccgatccgtataaaaggggtgaatgctccgtgacagtcctgaaaaatacaggcgatatcctttccgcgcacgcgtcggagtgctttgcgtccggcttgaagcatctgttggccttcaaatatcacgtctccgccggtcaccgttagtccgtccggaagcagcccggctatggccgaagcggtcaggctctttccgctgccgctttccccgagcagcgcgaaccattccccttcatgaatcgagaaggaggcatttttgacaatggtgtgctgccgggagctgattgataagtcctcaatggataacatcggcatgctaagaaactcctttcttgtgtttgacgtcaaacctgtcccttaaacgatcaccgtacaggttggacaacagaacgatgaacatgatcgcaagaccgggaatcaccataagctgaggcgcatgcaagaagtaatgttttccgtcgttcagcatggcgccccattccgggtatggaggctgagcatccaggccgatataggacagggcagcaatcattaacaccgtttttccgatatcaagtgtcgcaagtacggaaaggttgccgagaacatggggcagcaggtgcttttttaaaatcgccccggagcttaaaccggtaagctcggccaaggcgatgtaatctttttgtttttccgaaaaaaccgtgctgcggaccagccttgcatagccgacccatttgacagcgacgacggccaatattaagttcatcagccccggaccaagcaaaccgcttaaaacaatcgcgacaatatagtccggaaaagccataaccgcgtcaacaattctcatcatcatccggtccagccgtctgccgaaaaacccggagacaagcccgacaggaacacctatgaaaacggaaatcagaatcgcgcccaaggcggtgccgaccgtcgctttcgcaccggcgaccatccgggaaaatatatctctgcccaaatggtcggttccgagccaatgctgcatactgatcggctgaagacggttggccatatctgtgcggagcggatcgaacggcaaaaagaaggggacggtgaacagcgccgcggaaaacagcagcacaaaccatagtcctgttttagatcgaaatacgttttttctcatcggcgaccagcctcctttaagcgaatttccggattgaggtaccgataagagaggtcgactaaaagattgatcaggacaaccgcgatccccatgaaaagaatgtacccctgaatgatcggataatcacgctgaacgatggcatcaacgacaagcttgccgacgccgggatatgcaaacaggacttcaataatcaccgtgccgccgagcaggctgccgaggctgaccccgaatatcgtgatgacagggacaagacaatggcgaaacgcgtgaaagaagaaaattctcgcctcgctgatgccgcgtgccctggcagatctgatgaaatcctgaccaaggctttcgatcaggcttgaccgtacaaggcggacataaacgcccgacatcgcgatcccaagcgtgagagaggggagaatcaaatgtttaaacgttccggctcccatcgacggcagccaattcagcctgacggaaaagagatcgatcagtatcaatccgagccaaaagctcgggagcgcggctcccactaaagcgagcaagcggctgagatgatcgatccaccgatcccggtataaagcggaaagcgttccgaccggcacggcaatcagcagcataacgagaagcgatgcgccggttagaagcaatgtcgccgggaatttccggctgagctcgtcgatgacgggttcgtgtgttgtataggattttcccaaatcaaattggaaaaagcgcttgaaccagttccaatattgaatataaaccggtttgtccaaaccgagctcctctctgaatgcctcgatctgctcgtccgttaccgcaacatcatctacgcgaagcatctgtttcaccggatcaccgggagccgctttcataaacacaaagctgataaatgaaagcaggaataagaacaggaccagttcaaacagccgcttggcgatctgcttcatttcgttttcacatccaaatctttcgtcagcatataatactcacttttgctcgtttcccaatttaatacaccgtctcggtaggctgtgatgttttcgggagtcacgataaaagagttcaatgtctccttctcgatcaattcagctgcttttttggcaagtcggttccgcttctctttgtcgatcgtgcggttgaattccttaatccatttgatcaaggtttgattttcgatgccgctgtagtttaaagcgccgttcggcatataggcggtgttcagcaaatagctggcatcgcctcttggcgcggtcattgagctgtatgtcgctaaatcccagtcatcgtttttcgccaaatattcatcaatattttcgacttgctgaatcttaatcgaaatgcccaattccttcgcatttgattcaagaatttgcgcgattaaaggcaattccggacgagactgataggttagcagtgtaaaagacaaggcttttccgtcctttacggctttaccgttttcaagctcgtagccggcttttttcagctcagcttttgcagcctgaagtccgctcggcttttgaaccgtatcggaggaaaatgggaaatcggctaggaaggggccgtctgccggctgagcatgtccgttcaaaatgctttcagcgatttctttgcggttcagtagtgcgtcgaaggcgcggcgcaggtggcggtcagcaagatgatccttctttgtattgtaaagaatctggtgaacgcgcaagctcggtaccgaatcaacggtaatcgacgaatctttttgaatttggtcaatatcctcaacgctcggtctgtaaatgatatcggcatcttttgattggagagccatgacgcgggcgtttgcgtcttcattaaacgagaatgtgacgtgcttcagcttcggtttgccgtcccaataatcgtcataccgttctaactctattttatggccggcctcaaaagaggaaacttggaaaggtcccgttccgacgggctgttgagaaatgtttgctgcgctgacgtcaatgatcgatgtgtttggatgaaccaattctgaagggaattcgggaaacggctccttcgttgtaatcgtcaatgtttgtccttcagcctttatttccttgatttttagggcgttcttcatggctttactctcgcgcatcgtccgttctaaagacgcttttaccgctttggcatccgcttttttaccattttgaaacgtcagattgtctttaagggtgaagacccaagtttgtccgtctttgcttttccaatctttggcaatccacggttcgatggaaaggtccgcactgattttgacgagtgtttcactgatgccggcgcggatagccgtataattgacatcaagattcgggtcaagggtttgactcggaatattgaaaagaaaggtgagtttcttctcttcccctttcgctgagccagcgcctccggcggagcaggaagcgagaatgaagagaaaaataatcggtatgatcatgcgttttgctatgtaagccataagttatacctccaagtagtaatgatttcgatttacctcataatcataggggatattctcattgttgtaaacaggaatatttgcctttatatgacgaaagtacgaagacacatttttcggatcccgtccggcttttccatataaaataggtctgtaaaaaagaaagcccgaataatttgaatcaagggagttaatggaacgatttacagaggaaaaaaatatgctgttaataagatgttcaaacagcaagtgaaaggagccaaaaagtgatgatgattacagtaaaaatacgccatactgctgaaaccgaaggcacagacataggtgacttcactcctgctgaactcgaaagcatcgtccagacgatcagaaaatacggagcttggctttcacctgatgccgacacagatgattataaatttacattccaagacgctaaatacaatctcgaacaaagagtctttgaaatcatagtggagtaatcacatatcgagggggttgacggacactgaatgaacggtcggaataggcgtttatttagagtcctttttattttggcaagaggggtgacaattccgatcaatgaggagccttgaagaagttaagctcttcaaggctccttcaatcttatttcccgctggcggtcagcccgtctttaatcaaggcatttactttgctgctgaacaaaagaccgacatggcttacgcctgagatttgcacattgtttgcaccatcaagtttggagaggctgtttaagacgatatagtcgcttgtgctgtaaatcgaagtgtatgagattttgtcattctgaggcgccgtgtttgtaacgagacgattagcgcccccaagggtgacgacatgtccgactttatccgcaccatccagatttttaatataatagagcgtattggccccgcccatgctgtgggcgacaatatcgacttttgatgctcctgtttgattcagcacacgcttgatgtattcggataatctcggagcattgtttatattatttcccgttttatcgataaagttgatggcgtaaagctcactgcttgtccagccttgagattgtaaatacgatttaatgccgatgaagttataatcggctccgccgatgccgtggaccatgacgaccggattgtgggaagcggcggaagctgctgaaggccggaacgaaaatacggacacaacagacagcatgcaaatcaatagaatagataaaaatgaatgacgacgcatagtttttcctcctaaaaaagtaataagttcacaacaacgacaattctataaaacgaaaatatgaaaacgaagtgtaattttatctatttttcatacccgaaaaaagagcagtatatgaaacgtttttttaccgctgcgcgccggttctcttatagggtaaggagagtgaagcttttctgggagaaagcaaatcggtttgtgctgttgaattggaactaaggaatttttcctattaatctactgacgtacgtattaaaatggtaaattaggatcgggaaacggtataataaggaagcatatccaatactgcagaacactttggcggatggtcaggtacaatgttgaaaagagcgggtggatcttgatgaaaacatgggctttgaagcttctctctcatgtgcagcgtgtgccggctgcaaagcggtccgctgcatgtcaacaatgtgccgattggttatcaccagggattttcgatggaaaaaagtgtccaaggttttcgaatgatggcagaacggatcaggagtaagttctggttatcaaagagctgtgaatcaaagggggatgaatatgatttcaaaaacgccggagccgccgtattacgcggtgattttcacatcggtcagaacgaatggggataacggctacaaagagacggctgagaacatgctaaagcttgccgcagaacagcccggctttttaggagcagaaagcgcaagggacatgaacggaaagggaataacggtctcctattgggaaagccttgaagcgattgaaaaatggaagtttcacggcgaacaccggcaggcgaaggaaaaaggccgaacagaatggtactctgactttgccgtacggattgcaaaagttgaagacgccagaatttcggagcgttccggccggcccccgtcagatggcaccagcggggaggaaatgcaatgattcaattgttaaaccaaaaagatccgcatacagcccgcagcattgtaaatgttcaaaggccggcttatgaaagagaagcggagatcattcaatttcagggcattccgcagctgaatgaaacggtttttgatgtaatggattcacgagaaactttcatcggctcgtttgagggggaagaattagccggaatcgcttccttcatacatacagctgaaaagctgacgatctgcaggctggccgttcatccggtccattttcgaaaggggattgcaatggccctgcttcgttatatattgatggtgaaggaagccgaatcgtttgaagtgacgacgggtgcggggaatgagccggcaaaagcgctgtatcggaaattggggttttctgaaattgaacagtatgaacctgaaaaaggggttgttctttcaaggcttacgctgcaagcaccgagaaaggttaaagtcgtctcctataaagaagaatggaagggcgaatttttcaaggaaaaaaagcagcttgaagcgcttttccggaatgaagtcttgcatattcaccacatcggaagcacgtcaattccgggaatgagcgccaagcctatcattgacatactgatcgaagtgaaagatctcggctccgccgccggcttcgaaaaggggatgaaaatgctcggctatgaaccgaagggggaaaacggaattccgggaagaagattctatcaaaaagggagacggaagcgtacacaccatgtccatctgtatgaaagcgggcatcccgatatcagacggcatctcgcgtttcgggattatttaatctcccatccggagcgggccgaagaatatgctgcactgaagatgaagctggcggagatgtttccgcttgacatagcaggctatattgacggcaaaagcggctggataaaagagactgagcgcttggctgaacaatgggaaaaggctgaggaggacagataaagcccccctcctgcttcaagctctgacacaagagtcgaacattcctttatggcttccgtcacagtaaggcattttcagcgattttccgcatctgcacagcgaaaaagccggtttttcagggaaaggatttccttccatgtcgatcagttcgacgtctcccgtgacccggaaaccgccgttgtccatcactttaatctgcacttttttggacatcattccacctccgaatcccttcatatttatgcctgacagccggaaacgatgcgctttttcccgacccgtggtacaatgtccgtaaacataacaaagaaggatgatatcatgcagcttgaaatcactgctcaggcaagacaagccattcaacgggcaacagagccttatcctgataaaaagatccagctccgctatgattccgagggatgcggatgcgcggtcagcggtgtgccggtcttgtggctgacggacgaattatcgggaagttgcgagccccttgagacaaacgggcttccgatttatattcagtcatcgcaaaaagtcttttttgatgaagcgatgaccatcgactattatgagaaagcgggtgcgttgatgctgaagagtccggcacaggtgctttctcccagaatgagtattttagtgaaatagggtggcgttcgatttgaatcaaaaggtaaaatctttaaagcaaaccgctcaaaataaaacatgggcgtcctttttacatcaaaatcatccgtatacactccttcattggtcaatcggagggacagagtccgtcaaaaaggatgtctggcttcttcaggatgaaatgacctttgaaacaaaggaatttgatacaattgagacggccatctcctggatcggcgatcatatgagcgacattacagatatcctgtagcaccaaaagaaggcggacgagacttatgctcgttcgccttctttgtgccggtttgtgatttcttgaagaaagtcccgcaccgtgtttttgtagctgtttctgttttgggtgtagctcattgcgtgcgctcctctttcagcaatataaagccgtttcttccccggttttttctcgtaaagcatttcgcttgattcagccgggatatagtcgtcgtgcttgctgtgaatgaacagcaccggttttttgatctttccgacgacggataaaggggagacatcacggatgcggtagccgtcccgccatctcaaaaagaggctggcgagcggcaaaatgaaagctcctggaagatgaaaatcttctttcagccggtaaatgagctgatcctcaaatgtggcaaacggacagtcggccacataaaaatcagcctcggcgtcatccattcccgcgtaaagaagggttgtgacagcgcccatcgattcgccgtgaatcccgatcagcgcttgttcgccgtgtttttccctcagccaattgacaaccgttttcaaatcgtttttttcataatatccgtagctcgtcgtttttccgccgcttgcgccgtgccttctgtggtcatatatgacggcgttccagccgagatccagaaacagattcatatatttgattgaattcagcagattcatcgtcactccgtggcagataatcacggtgtttttcgttttgtgcgggtgcacgtagtaccctttaatattgtagccgtaagaagaagcgagggtgatttcttccttcgggagagcggcgaaagctttttcgtcataatggccgtcggcagtttcccgctcaataatgtattggtcggtccgttttttaatgtacatgatttgattcgtaaaatagattccgagcgcagcaatgaacagcaaaaccgctccgatagcagccagccaaatcaacatttgttgtattcttcctttcttaaatgcttctctctttatcataccacacaaccattgagatttgccgaggggggcggctcccagagtgacggcttgcctgaacttttagattcctgataaactatcatcacaaacagggagaacggaggacaggaaatgggaaagaaaaaacaagacccaaatacccggcagctgctgaaagatgcactcgccgacgatttgaaacataagcttcagcaaatgaaaagcgaattgaaagaggaggacgagaaaagaaaagagcgtgagaaagaacggcttatcaaggaaagacaggaaagggaaaaaaataaaagctttgaagaactcctcaacgaaagcggacttgacgactggaggaagtataagtaaagaagcaccgtctgccaaagagacggtgctttcttattgaattcattcgcgatgcgcagtgtacacgtcgcgttttgtataaaagcggagcgctttgatttcctgttctgtcaggctgcgtccgccgacagattcaacgttttcccgaagctgggagagtttgctcgccccggggatgaccgcgccgacagccggctgggcgagaatatacttcagcgcggtttcggttgcggataaatcaggcgctgttttttcaatgtccgcctttgttttgatgagttcatcgtaggaatatgataaatagccgcttttcttaatcgatgcgtttgcatctgacaggggtttttctgtcagaatcccttttgccagaggtcctcttgcaatcacgctgattccatgttcttcaaggagagaaagccattcctcaggccgtctgtccaacaagctgtattgcatcatgactgtgacgatgtttgattttttgacgtattcctttatgacgttcggccggatcgaggaaatgccgtaatggcggatgacgccttcctgttttaactcttcaaaggcctcaatcgtttcgtcgatgttatcttcgatcgttccgccatgcagctgataaagatcgatatagtcggtttgcagccgctttaagctgcgtttgacggcttcttttatgtatgctttccggggatcccagaaccagcccggttttccttcctcccagcggtttcccgcttttgtggcgaggatgacatcttggcgccttgatttgatcgcttcaccgacaatttcttcgttgcgtccaaaatcgtacaggtcggcagtatccaagtaattgatgccgagttccaaagcttcatccagaattgacagtgcgtgctttttgtccgttccgagagacatgcagcctaggccgacttcactcacctgtaaatcggaatgtccgagcgtcctttttttcataagcctcactcctttttttcttactttgaccgtaatacaaaggagcgaagttttcaacccatcggcatcgggatcagaagtacagctcgacgatgatcatgcttagggcgcaaatcaaacaaaccgcggcagggatggccgtgaaaaaaggctgccgcgcccggaccaggtgggcatggatggctcctgtcataagcagggagaataacagccccgaaccgacagccagatgcacattccaaattccgccgatcatgccaagcgctccggcgatttcgagacatcctgtaacagaaagaaaccacagcggatattcataatggcgccaatgttcgacttgaaaaggaacgtgcagcaccttgattacgcctccggtcagcataaatgccgccagccctgcttttaagaaaataaatgccactgtgttcactccgtttctggatgctgcggatttacgagcattccgtggatcaaaagatccgtgatttgttttgcgagacttgaggggtcctttgatccgtcaagcaaatagatatcggcaaggtgctcaatcatgcctgtcagacattcagcaacggtctccatttccaggtcggatcggaagtagccgagctcctgctctgctttcaagttttctttcaaggcgagcgttaaatcttttttcatttcgcctgcttcagggctgagaaaaaaaccgatgcgagtcaaatccgggtcctctgccaaaaatcgaaatacagcctctacagcggccgttacccgttttgatacgtgttttttctcgattcctttctctaaatggaacgattcgatcagattttttaagttcgcgtgaaagccattgatcagctcgtcatagatggcgtccttgcttgggaaatataggtagaaagaaggctgagtcagtccagctcttttcacaatcgtactcacttttgtctcatggaatccccggtttgcaaattcgtttgcagcgacctcgagcagccgcttccggctttgtttgcctttgcggcccttttcaattcccacatccatccgcctccaaataataatacttgtgagtaacattactcacgagtattatttcatgcagtccttcttgatgtcaataaaattaagcttttgcaggcgattttctttttcagaaagccaatctttcacatagtgatgcgttcgtccgtattccttcagcttggcgcggatttcccatgctttcccagacatgacgatgcggtcattcaggcggtagaccttcatggcgcgtccccctttcatggtgtatgataaaatgtatgggatctaaagccagagcagaacttaggagatgatcaaactgaagcatttagaggagaaaaccatatcaaaggaaaagcttttttcaggcaaggtgatcgatctttatcttgaagatgtcgaactgccgaacggtaaaacgggaaagcgcgaaatcgtgaagcatccgggcgctgtagcggtgcttgctttaactgatgaagaaaacatcatcttagttaagcagtacagaaaagcgcttgaacggacgatagttgaaataccggcgggcaagcttgaaaaaggggagaaacccgaatataccgcgctgcgggagcttgaggaagagacgggatacacggcggcgaagcttgagaaaatcaccgctttttacacatcgccgggctttgcggacgaactggtgcatctgtacctggctgaagagctgacgccgcttgaagaaaagcgcgaacttgatgaagacgaatttgttgaagtactggaggtgccgctttcaggcgcgctgaaactgatggaaactcaggacatctatgatgcgaaaacggcttatgccgtgcagtatctggagctgagaaaggccctgcaagcaaaaaaatgaaagaaatattcgcagacatgcatatccatatcgggcggacggaatcaggccggcccgttaagataacggctgccagaacgctaacgctcgacgaaattttgattgaagcaagcgaacataaagggatggaactgatcggcattatagattgtcattcacccgaggtgctggccgaaattgaaaaaggggtgtcttcagggcgttatacagagcttgaagacggcggaatcaagtataaagataccgtgcttttatgcgggtctgaattggaaatcaatgatgacagatgccgcggcccgattcatgtgcttgcctttatgccgtcgatctccgcaatgaagcagttttccggctggctctcagaaagggtgacgaatatccacctgagctcccagcgcatctatgagacgggcatcggtcttcagcggaaggtgaaagagctcggcggcctgttcattcccgcgcacatttttacgccgcacaagagcctgtacggaaaaggagtcgaattttcgctgaaagaagtgtttgacccgaggatgattgatgcggttgaactcgggctgagcagcgacaccgatatggcttcacacgtatccgaactgaatccttatgcatttttgaccaattcggacgcccattctcttggaaaaatcggcagggagtataataagctacacatcaaacatgccagctttcaagagttttcgcttgctttaaaaggacaagaggggcgtagcattgccgcgaattacgggatgaatccgcagctgggcaaatattttcaaaccgcttgtgaaacatgcggccgtctgcaggaggcagatgaaacgttgtgcaaagcgtgcggcagccgaaagtttacaaaaggcgtcagcacgcgtctaatggagctttatgatcaggatgaaagcccggtcaagcgcccgccgtacgttcaccaggttccgctgcagctgatccccggcatcggcccgaaaacgattcagaagctgaaagaggctttcggcactgaaatgaatatacttcaccgtgtaaaagaaggcgatctaaaagaaaccattcgtccgcagacggcagagctcgtgatcaaagcaaggaacggggatttagagctgaaagccggaggcggcggaacctatggaaaagtgcagagctaaagggggctttagagaacagggatggagtggaaactaaaatcgtatgaggaattgtcgaaggaagagctgtatcgcatcatcaagctcagaatagacgtctttatcgttgaacaaaactgtccgtatcacgagcttgatcacttggatgagcgggcgcaccatttatttctgagccaagaaggagagatcgctgcgtattgcaggctgttcccgagcggcacagcataccccgaggcatcaatcggccgggtgatcgtccgcaaagaagacaggggaaagggatatgcgcaggcgcttcttgataaagcgatccgctttttggaaggcgagtgggaagagacaaaggtcaagatcagcgcccagaatcatttgcgttccttttacggctccttcggatttaaagcaatctcagacgtctatatggaggacggcattccgcatgtggatatggtcagaacggaagaaaccgtatgacttgcgtttagaaccccgcctttctataatagtgaggtaaaaatttgacaggagagtggggaacatggccaaaagcaaggcaaggaaaaagcgcgagcacatgttgagaaacacaggcagagatgccgccgcatcaagaggcaaggcgccggacttcggcacgcacgtcagaaaaacgaaaagcaggcgggaagagcttgcaaagctgcatatgaaacataaacgaaagaacccttatgatttgcttcatgaagatcataagggttctttttttagaagatgcgcgaataaatgcatgtgtcccgatattcgctcaaatcgttcgaaaggtcatcgctttgtaaaacggcttcaagctcgaaaccgaggcgctccgccatttttctgcttttcgtgttcatgctgtcacaacatatctcaagccgcttggctctgacgtgtcttctcgcgaaatcaatgagaccgttaagcgcttctgtcatgtacccttgtccggaaaattcggaactgcgccaatagccgatttcaaaccgtttcgctttccagtccatgcggtgaagaccggtgctgccgacgaattttcccgtttctttatggaaaatatgcatccgcaaatcgttgcgcaaaataaaatcggcctgtgcccgcctgacgttgatttctacacgctcttcctcggggatctcccttgcaaacggcatccacggctttagttctgaaaacgaagctgcaatagcatcatatactgccttgccgtcaccggcgcgcggtgctctgatcagcaggcgctctgtttcgaagctgtccggaaaatcgagcagtatcggattcataaagtattcctcccgcaggtgtttttcatgaaatgttgccaccgcaggcgacgtgatccaaaaggcctgtccgtcgaactcggcgcccgtttgcatcattgctctccatcgaccagtggaaaatttttgataatatgagtctatcataagctgcctttgaaaaaaagaggtaagaagaaaaggcatttttcactagcgaaaaatcttttttcgatattacccgcttatttttcttccgccgccttcgtattgagccgtttcatttgaaatggcagccggcggatggatgcgcattaaaaagatataggcgaaggcagcgatcagcacgcccgaaaaccaggagatgtcataaagcggcttcatggcggggatgtaagagccgatgagagatataagcgctccgagagctaccgcagcaaaagccctgtaattatagcctttataatacatatactgtccttttgcggaatagagatcttcgaggcagagggtgcgcttccggatgatgaaataatcggcgagcataacgcctgcgaccgggcccaatattccgccgatcgtgccgagaaacgaaaacacactcgcttcattctccatcagcttccatggaaaagtgaacagggccaaaactgctgtcaaatagctgcctcgcttgaaatcgatgtatttcggcaaaaaattggccagatcataggcaggcgagacaatatttgccgcaacgtttaccgaaatggcggcgatgcaaagcgtaatgaccgaaagagcgatcacgtacggattgtcaaaatgggcgagaatatcgaccacgtcccaaatcggctccccgaaggcagcctgtgagccggaggtgacggtgatgcttgcagaacgaatgtgcccggcaaaccgtaaaactgtcctctgatttgttctttttgggaggctgcaaacctcgtaaaatcgggaatgttcaaaatgagcgtcgcccaaatgccgataatccccgtcacaccggcaagaaatggccaaattaattcgctgaatgtctgaaattttcccggctgcgaataaatcggaccgagcccccctgcaatatcgaccgcccaccacaccatcccgccaaagacgagataaacgagcgggccggcccagacttcaaaccttctaatcgactccattccgtgatggaggacgagaagatgaatcccccaaaagaaaacaaatgacaaaagacccggtaaatgcaaaccaaataagttccagtcgccgccgatgtctttccagccgctccatacgtttaagatcaggatgttgatcgccgtgcttcccgcaaacgcttgaatgccgaaccacataatcgctacgaaacctctgaggagcgccggtatattagccccgtagatcccgaaagaagacctaattaatactggaaaaggcacgccgtattttgcgccggcatgtccattcaacgcgagggccgcgtagagaacaatcgaagcgacggcgataatcccaagcacttgccacggagaaagtccgatcgcaatcagtccgccaaccgttgcataagtcgggatgttatggatgcagcccatccagatcgatgcgaaattaaccgctttccatgtgcgttcctccggcttcagaggctgcaagtcgctgtttgagagcgtgaggtctgtttgaattttttcttgatggacaggtttcatgtaatccctccggattttttaaggaaaaatataactcattatcctgaaaaattcattagataaactaaacaaatgtttcaaggcgtttgttgaggttgactaaacgagccgtttgaaacagctataaaaatattgatttttatgaaacagttgtctatctcgatcataggataaaagaccaggttgaaatgtttctccgcatcataatgaaagcgttttctttgaggcggaggaaaagatgaatccaaagggggtcaattgataatgaagaaaattttattggtttgtgcggccggcatgtcaacgagcctgcttgtcagcagaatgaaaaagcatgcagaggcgctgaacgaagaggtcgacatcattgctctgcctgtatccgaagcggggactgccgcgtcaagcgcggacgtcgtattgttggggccgcaagtcaggtaccaaaagtcacaggttgaggcgagcgcaggagacacgccggtccaggtgatcgacatgcgagactacggcaccatgaacggcgaagctgtgctgcaaaaagcgctgcagctgatgaaataaaaaaggaggggagatagggatgagcgggtttatggagaagtttgagcggaacgtggagcggtttttggttcccgttgctgcaaaattgaattcacagcgccatatatgtgcgatcagagatgcttttattctatcatttccgattattatggcaggatcgattatcattttattgaattttgccattttatctccggacgggtttatcgccaaaattttatttcttgaaaagatatttccgaacttggctgattaccagtcggtctttacgcccgtactgcgggggtcgctcgatattatgtccatatttgtcgtgtttctcgtcgcccgcaatttagccatctcaatgaaagcggatgaactgcttgccggattaacggctgtatcctgttattttatcatttattcaccgtaccgcctgatcgaaaacgagagctttttaacgacgaaatggctcggcgcccaaggactgttcgtcgccttaatcatcggaatcatcgtcggtgaagtgttcagcaggctatcaaatgccaagcgactgcaaattcatatgcctccgcaggtgccgcctgcggtcgcccggacatttaaagtgctgtttccgatcatcttcattacgattggttttgcgatattaagctttgcgctgatgtccctgtcgaaaaacggtctgcatgaattggtgtatgctgtgctgcaggcgccgttgagagagatgggaacgaatattttcaccgttgtttttcttggaatcgtcgccaactttttatggctgttcggcattcacggtccgaatacgattgcggcgatcagagaaacgatttttgcagaagcaaaccttgaaaacctcggttttgccgctaaaacaggctctgcatggaacgctccgtttcctgaaacatgggcgctgaatgacgcctttgcgaactacgggggatcaggcatgacgctggggcttttgatcgcgatattcatcgcttcaaagcggcgggattataaagatatcggcaagctttcgatcgggccgggaatatttaatatcaatgaacctgtcattttcggacttccggtcgtgctcaatccaatcttcatgattccctttattatcgttccggcagtcaatactgtcatcggctatttgttcatcaagtttcagctgattccgccgatcgcatacgctgttccgtggacaacgccagggccgttgattccgtttctcgggaccggaggaaactggcttgcgctcggcgtcggctttctctgcctcgccatttcaacggtgatttatctgccgtttgtgatggctgccaacaagactgtgaatacggacagggagcattccgcggaaaacaggaaggaatcataactttagacggggcgccttttacgggcgcccgtctttttttaaaaaaagtcatgcggctctcttttctctcatacaatctattaaaatcaaaagcacgtctgggaggaagatacatgcggaagcccacaatcaaagagctcatctttcaacatatgaaggaccatctgtcgatctatttatttgtttctgtgctgttcttaatgggtgtgattttcggcgcggtcatcgtcaacagcatgacgatcggtcaaaaagaagatttgttctactatttgaatcaattttttggacagctttccgaaggaaaagcagccagctcaaaggaaatgtttttgcagagctttcttcataatatgaaatatttaggcttaatgtggattctcgggatatccatcatcggtctgcccgtcatttttatcatggtcttcttaaaagggatcgtcgtcggatttacagtcggctttttggtcaatcaaatgggaatcaacggctttttcctgtcttttgtctccgtgctcccgcaaaatattctgctgatcccggcgtacttgatcatgggcacctgcgccatcgccttttcgatgaggctcatccgccagctttttgttaaacgcagccttgcagaagcacctgtccattggtttggccgctacgcttttgtactcgtcctgattctcgcaatgtctcttatatcctctttctttgaagcatacctttcgccagtgttgatggaaaagctgacagagtacgtcttgccgaaacagcattaatttataatgattattaaaaaatattcattttgtttctcaatttataatgattatagttggctctctgcgcttgttttgttataataagctaggtaatgcggcgtaggagggaaagtcaatggaaacacgtattgatcggattaaaaagcaactgcattcttccagctataaactcacccctcagcgcgaggctactgtaagggtgctgcttgagaatgaggaagaccatttaagcgcagaagatgtatacctcctcgtaaaagagaaatctcctgagattggtcttgcgacagtatatcggactcttgaactgttaactgaattaaaagtagtggataaaatcaattttggcgacggtgtgtcaagatatgacctccgcaaagaaggtgccgcccatttccatcaccacctggtttgtatggaatgcggttcggttgttgaaattgaagaagatttgcttgaagacgtggaagaaatcattgaaaaggattggaaatttaaaataaaagaccacaggctgacgttccacggcatctgtcatgactgtcagcaaaaggaatcggaatagcctaaaccggagagaaccctttcagccatgagcgggttcttttttgattcagacgtataaaacttgtctcatttggcataagttttagtaatcgaatcaaaagaagggacctgaaaccgtatgaaaatgctgaaaacggccgccgatatgatcaaggtgtttgtgctgtttaccggttttaccgtcttgttttattatgctatgatatggataaattcagagtatgaaaactatcatcggtatgataaacctgaaggagcagccctcaaggtcgcctcgatggaagaggacgagcagggcagctggtttaaccggttaatctttttttatttgaacggggagtaggatagcgtgaaagttcatattaaagactttatccactacgccgttgttgaacgggggctttcccacaacacggttgtgagctatgaacgggatttgaacagctacgccgcctatttagaggagcaggagcagctgagctcttttgaccaggtgacaaggctgcacatcatccagtttttgaagcatttaaaagacgccggaaaatccggaaagacggtcgcgaggcatctcgcttccatccgcagctttcaccagtttctgctgagggaaaaagtgacggcccaggacccgtccgtccatattgaatcgcaaaaaacggaacggacccttccgaaggtgctgtcattacaggaagtcgaaacgcttttggatacgccgaagctgacggggccgttcggctaccgcgataaagcaatgctggagttattgtatgcgacaggaatccgcgtcagcgagatgatcgcattaaagctgtccgatgtccatttatcgatgggctttatccgctgcttcgggaaaggaagaaaggagcggatcgttccgctcggcgaagcggcgtcacatgcggtcggcgaatatctgtcaaaagcgaggggcaagcttttgaaaaaaaataccgaagacgccctgtttctgaatcaccacggcagacaaatgagccgccaggggttttggaaaaatttaaagaaaatcgctttggaagcgggaattaataaagagctgacgccgcacacgctgaggcactcattcgccacacacttgctcgaaaacggagccgatctccgggccgttcaggaaatgctcggacacgccgacatttcgacgacgcaaatttatacgcacgtgacgaaaacaaggctgaaagatgtgtataggcaataccatccccgtgcatagcctgaaaggacaggcggtagcacggtttttcatgttgagggagtagcaaattgcgggaagtttctcactatttccgttcgtattgtcaactgttgtgtaaacggtttatacttggctaatagcggtattttggtttttttatgccaagcgtgacagcctatagctgacagaaagaaaaaaaggaggccgacaaatgcctgcatttgattataaccgcgtatttttaattgtaatggattccgttggaatcggcgaggcgcctgatgccgaaaaatttaatgacaaaggcgcagatacattgggccacattgccgaacacatgggaggcatcagcctgccgaacatggcaaagctcgggctcagcaacatccgtgaaatcaaaggcgtcgaaaaggcggaaaagccgcttgcctattacggcaaaatgaaagaagcctcaaacggaaaagatacgatgactggccattgggagattatgggactttacatagacaaacctttccgggtgtttcccgaaggttttccggacgaattgatccacgaacttgaacagaaatccggaagaaaagtgattggaaacaagcctgcatcaggcactgcgattttggatgaactcggtgcggagcatatggaaaccggcgcgctgatcgtctacacctcagcagactccgttctgcagattgccgcacacgaagaagtcgtgcctctcgaggaattgtacaagatctgcgagatcgcgcgcgagctgacgcttgacgagaaatatatggtcggacgcgttattgcgaggccgtttgtcggcaagccgggcgaatttaaacggacgccgaaccgccatgattatgcgctgaagccgtttgacagaaccgtgatgaatgaattgaaagatgacagctttgatgtgattgcgatcggcaaaatctccgatatctacgacggcgagggcattacggaatcgctcagaacgaaatcgaatatggacgggatggacaagctggtgcaaacgcttgacaaaggttttactgggatcagctttgtaaacctcgtggactttgatgcgctgttcggacaccgccgcgatccggaaggatacggaaaagcgctcgaagagttcgacgcgcgccttcctgaagtatttgaaaagatgcgcgaagatgatctgctcatcattaccgccgaccacggcaatgatccggttcaccatggcactgatcatacaagggagtacgttccgcttcttgtatacagcaaaaaacacgaaaagcctggggcgcttccgctcgcagatacattcgcggacatcggcgcaacgatcgccgacaactttaaaacgaatatgccaaagtacggaaaaagctttttatccctgctgaaataggaggaaacgacgtgaaacagatgattgcaaatgccgcagactatattaaaagcaaaacggaaatcaaacctgcggtcggcctgatattgggatccggccttggcgtgcttgccgatgagatagaagacgccgtccgcattaaatatgaagacatcccggactttcctgtttccactgttgaagggcatgccggacagcttgtcatcggcagacttgaaaatgtgcaagtcgtcgcgatgcaagggcgttttcatttttacgaagggtattccatggacaaggtaaccttccctgtccgtgtcatgaaagagctggggatcgagactttaatcgtgaccaatgccgcaggcggcgtcaatgaatcgttccgtcccggcgatttgatgatcatatccgatcatatcaattatatgggaacgaacccgctgatcggtccaaacgattcctcgctcggcgtcagattcccggatatgtcgtccgcatatgataaggaactgcgcctcttggcgaaaaaaacagccgaagaattgaacatcagcgtacaagaaggggtttacacagccgttacaggacctacatacgaaacgcctgccgaagtgcggttcctcagaacgatcggatcggatgccgtcggcatgtcgacggttccggaagtcatcgtggcaaaacatgcgggccttcgcgtgctcggcatttcgtgtatatcaaacgcggcagccggaatcctcgatcagccgctctcccatgatgaagtgatcgaagtcaccgaaaaagtaaaagccgacttcttgcggtttgttaaagcggcagtcgccaaaatcggctaaaactacagcgaagttgaaatatgagccagtgcaagttcaaatgagagcctgcattggctctttctttttggtcgttgagaaattttttccaaccgatccgtataaatccaaccggattggaaaaaatagagaggattacgaaatggaggtctgggtgatgaaacgtcatttatccaaattgctgatttttacgataatcctgatgactgcgccgtcggcgcttgcaaaagagagcgcaaagaaaccgtcggagcttgctgatgacgcaaaatctgccgttttaatcgagcgggataccggtaaggtgatgtatgacaagaacagccgtgaaaagcttcctccggccagcatgacaaaggtgatgaccatgctgctgatcatggaggcccttgatgaaggcaaaatcaaaatgaaagacaaagtcagaacaagcgagtatgccgcttcaatggggggttcgcaaatttttctagagcccggtgaagaaatgacggttgaagatatgctgaaagggatcgccatcggatcgggtaatgatgcctctgttgcaatggcagagcatattgcggggtctgaagaggaattcgtcaaaagaatgaatgaaaaagctgctgagctcggcctcaaggatacgtcttttcaaaatacgacaggtctgcctgaagaaggccattacagcacagcctatgacatggcgctcatggcgaaagagcttttaaaatatgaaaacatcacgaaatttacgggaacgtatgaagactatctgagagaaaacactgataaaaaattctggctcgtcaacacaaaccgcctcatcaaattttatccaggtgttgatggagtcaagaccggctttacaaatgaagcaaagtactgtctgacagcttcagcgaaaaaaggaaacatgcgcgtcatcgctgtcgtttttggagccagcacgccgaaagaacgaaatgcccaaatcacaaaaatgcttgattttgcgttcagccaatatgaaacgcatccgatgtataaacgtaacgaaatcatttccgatttgaaggtcaataaaggccgtgagcaaaaaataaaccttgtcacatcagaaccgatttcccttttgacgaaaaaaggcgaaaatatcgaatctgttaaaaaagaaatcaaacagaaagaagatatccaggcccctgtcaaaaaaggcacagagcttgggacgctcgttttgaaaaaggatggaaaggtgctcgctgaaagtcctcttgtcgctgaaaaagatatggacaaagcggggatgtggacgatgttcaagcggacgatgacccactggacgaagtggagtgaataatgccgaacggtcactagttttgtcacggtgaaggaatttataaagtctgaagcgaaacactcattatccgatttaaaccaaggaggaatgaggatgagcctcggaatcgatattcacgtcaaagaatccgtattatgcattcggttgacaggtgaactcgatcaccatacagcagaaaccttgagaaaacaagtcagtgaccatctggaacaaaccgacattcgccatattgtcatgaatcttgcagacctttcgtttatggacagttcagggcttggcgtcgtgctcggcagatataaggagattaagcagctcggcggagaaatgatcgtctgcgccatttcccctgctgtcaaacgtttatttgatatgtccgggctgtttaaaatcattcgccttgagcaatcagagcagcgtgcacttgaaacgttgggggtggcgtcatgaaaaatgaaatgaacattcagtttacagcgctcagccaaaatgaatcgtttgcacgggtgacagtcgctgcttttatcgctcagcttgacccgacgatggatgaactgaccgaaattaaaacggtcgtatccgaagcggtcacaaacgcgatcattcacggttatgaaaactcagggcagggaaacgtatatatttccgtcactctcgaggaccatattgtctatttaacgatccgcgacgaaggagtcggcatccctgatcttgaagaagcgcgccagcccctgttcacgacaaagcctgaactcgagcggtcgggaatgggctttacgatcatggaaaatttcatggatgatatttcgatcgactcctcacctgagatgggaaccacaatacacttaacaaagcacttatcaaaaagcaaagcgctttgcaattaagggagatttgttatggatgtggaggttaaaaaagaaaaccagaacactcagcttaaagaccatgaagtgaaagaactgattaaaaacagccagaacggcgatcaaaaagcaagggacctcctcatagaaaaaaacatgcgtcttgtttggtctgtcgttcagcgttttttgaacagaggctatgagcctgacgacctctttcaaatcggctgcatcggcctcttgaagtcggtggacaaattcgatctttcctatgacgttcggttttccacctacgccgttccgatgattatcggcgagattcagcggtttatcagagatgacggaaccgtcaaagtgagccgctcgctgaaagaactcggcaacaaaatccggcgggcgaaagacgagctttccaagtcaaacggccggattccgaccgttcaggaaatcgccgattatctcgaaatcagttcagaagaggtcgtgatggcccaggaagcggtccgctctccctcgtccattcatgaaacggtttacgaaaacgacggggacccgattacacttctggaccaaatcgccgatcagtcggaagagaagtggttcgataaaatcgctttgaaggaagccatcaaggatttggatgaacgggaaaagctgattgtttatttaaggtattacaaagacaagacgcaatctgaagttgccgaccgcctcggcatatcccaggtgcaagtctcgaggcttgagaaaaagattttaaagcaaatcaaaaaccagatggaccattttgaaagctgaggctgctcatgttgcaggcagcctcggatgtccgatgaaaaaccggacgctcttgggagcgttccggtttttttgtgtggtaatttatggtcttttgcgcctttctgaatgataaatgggatgtacttcatactacaactataaccatcatataggaagtgacccagatggaacgtcaagtttttatcagactccgccaccggcttgaggcagatccggatgaattgattttgctcggccatatcgcacaggtagcgggtgaccgccgatacaaagaaaagcttgaacggctgcctatttatcaggtcagcaaagcggatcaaagcatggtggtgctggacgtgatgaaggtgattgaagctgtacataaatcgtttcctgaccttgatgtccaaaccgtcggcggttctgaaaccatcgtggagatccaatatccgaaaaggggtctgtcgcccgtgcttttcatcgccgtctggctgctcttgttcgtcggtgccggccttgccgtcatgaactttcatgaagatgtcagcatgagggaagtgcacatcctgctttacgaaatggtgacgggcaaggtgaaccgctacccataccttttgcaggttccgtacagcatcggtctcggcctcggcatgatcttgttttttaatcatttatttaaaaaacggtttaacgaggagcccagccccctggaggtcgagatgtttaaatatcagcttgatttggaccattatgtggccatgcacgaaaacaaagaaacgacaaaggatattcatgatcattagcgtgatatttatcatctttctcggactcgcaggaggggttgctgttggatccggctttgtcgcttttcttaccgtgcttggcattatcccgaggctgactcagctgacgaaaacaaaaggatttatccaggcgtatgaatgggctgtcattttaggcgcggttttcggaggatgggaatcgctgaacatgtcccgcttttttttatccaaatggctgcttgttccgatcggcctttttgcgggcgttttcattggaatgcttgcagcggcgctaacagaagtcttgaacgtgctgccgatactggcgaaacgcatcgggatgggagaccggattttgatacttttaatggccattgttttcggcaagattctcggatcgatgttccaatggctcatttttgttcatttgtcataaaaggaggattatgatgtcaagtttgaaagataattatcaatcgaaagttaaagcgtatcagccttcaccgccttatgtcctgaactgtatcaaggcatttctcgtcggtggtctgatttgtacgatcggccaggctttccagaatttttatatggctgtgttccattttgatgaaaaaacggccgggaacccgacggttgccacgctgatcctgatctccgctctgttaacaggccttggcgtctacgacagaatcggacagttcgccggcgctggttctgccgttccggttacagggtttgccaacagtatgacgagcgcagcgcttgagcacaaaagcgaaggctacgtcctcggcgtaggtacaaacatgttcaagcttgcgggaaacgtcatcgtgttcggtgttgtggccgcttatattgtggggatgatccgctttgcctttgacaagctgttttaggaggaaaacatcatgaaattaacaggaaaacaaacatgggaattcgagaacccgctgtttgttaactcaagcggaacagcggtcggtcccaaagaaaaagaaggtcctcttggacacttatttgacaaaagctatgatgaaatgcactgcaaccagaaaaactgggaaatggcagagcgcaagctgatggaggatgcggttcagtccgcgttatcaaaacaaaatcttaaaaaggaagacatcgatatctttttggctggcgatctgctcaaccaaaacgtgacagccaactatgtggcgcggcatttgaaaattccttttctctgcttatttggagcatgctcgacatcaatggaatcgatcgcgatcagttcggcgttgattgacgggggtttcgcaaagcgcgccctagcggcaaccagcagccataatgctacggcagaaaggcagttccgctacccgacggaatacggggggcaaaaaccgggaaccgcgacttcgacagtgaccggaagcggagcggtcgtcctcagccagcagcccggcggaattaaaattacaagcgcaactgtcggaagggttatcgacttggggattaccgattcgcaagatatggggtcggcgatggcacccgctgctgcggatacggtcaagcagcatttggaggatctgggacgcacccctgatgattacgatctgatcttaaccggcgacctttcaggcgtcggcagcccgattttgaaggatctgttaaaagaggaaggaatcaatgtcgggacaaaacataatgactgcgggctgatgatctatacgcctgaccagcaagtttttgcaggtggaagcggatgcgcttgttccgcggtcgtcacctttgcccatattttcaaagaaattgaagcgggaaggctgaacagagtgcttgttgtcgcgacaggcgcccttttaagcccgacgatcatccagcaaaaagaatcgataccatgcattgcccatggcgtcgtatttgaacgggccgaaagggggaacgcttaagatggagtatgtcattgcttttattgcaggcgggctgatttgcgtcatcggacagctcttgcttgatatcttcaaaatgacgccggctcatgtcatgtcaacttttgtcgtatctggagcgatccttgacggattcggcatttacgaccgttttatcgaatttgccggtgccggggctacagtcccgattgtcagcttcggccactctcttttgcacggcgcgatgcaccaggctgagaaacatggctttatcggaatcggcatggggatatttgaactgacatctgccggtatatctgccgctatcttgttcgcttttcttgttgccgtgatttttaaaccgaaaggataaaggaaaatgccagcaaaacgcaaggtcattttggtcacagacggcgatatatacgctgcaaaagcaatcgaatatgcagcaagaaaaacgggtggccgctgcatttcccaatcggcggggaatccgagcgttaaaacaggaccggagcttgtaaccatgatcctgcaaacccctcatgatcctgtattcgtcatgtttgatgattccggacttcaaggtgaaggcccgggagagacagctatgaaatatgtagcgatgcatcccgatatcgaggtgctcggagtcatcgccgtcgcttcaaaaactcattatgcagagtggacgagagtcgatgtatcaatcgatgcagaaggcgaactgacagagtacggcgtcgataaacacggggtcaaagagttcgatgtcaaacgaatgaatggtgatacagtctattgccttgaccagctggatgttccgatcattgtcggaatcggtgatatcggtaagatgaacagaaaagacgatgtggaaaaaggttcgccgattacaatgaaagcggtcgagctcattttagaaaggagcgggtatcatgagtgctcaaaagcaagagaagacgaacgtattccttgatccttctaagaatgaagcgtatttcaagaagcgggtcggcatgggagaaagctttgaccttggcgtacggaaggtctttattctcggacatgaagttcagctttattatgtcaacggattgtgcgacacacaatacatcattcacctgttaagagaactggtgcatctgaatgataaagaaaaagaatcgggcgaggtcgaagacatcgtcgaaaacaggcttttgaaccagcaggtttcaaaagcggaaacgcttgatgaagctgtcgaccaagtgttgtcaggactggttgccatcatcgtcgaagatgcgggctttgcttttatcatcgatgtcagaagctacccgggcagaacgccggaagaacctgatacagaaaaagtcgtacgcggtgcaagggacggactcgtcgagaacatcatcgtcaacacagccctgattagacgccggatcagagatgagcgcttgcgctacaaaatgcttcatatcggtgaacgctctaaaacagacatctgcctctgctatttggaagacgttgcagatcccgatcttgttgaagtattaaaaaaagaaattgaagatgtgaagatcgacgggctgccgatgtcggataaatcggtagaggaattcctggtcggccaaggctacaatccgtttccgcttgtcaggtttacggaaagggcagacgtagccgcaagccatattttagaggggcatgtcatcgtgatcgtcgatacgtcgccaagcgtcatcatcacaccgaccactttgtttcaccatgttcagcatgctgaggaatacagacagacgccggctgttgggacgtttttaaggtgggtgcggtttttcggtattttggcctccacctttttgctgccgctttggctgctgtttgtcattcatccgtcgctcttgcctgataatttatcgtttatcgggttgaataaagacacccatattccgattatcatgcagattttcctggcggatctcggcgtcgaatttttaagaatggccgccattcatacgccgacggcgctttcgactgcaatgggcctgatcgccgctgtattgatcggcgatatcgcgatcaatgtcggcttgttttctcccgaagtcattttatacgtttccctctcggcaatcggagcctacacgacaccaagctacgagctgagcctggcgaataaaatggtgaagctgtttatgctgatattggtggcgctttttaaagtggagggatttgtcatcggattaacgatcttaactatagtgatgacttcgatcaggtcattgcgaacgccttacttatggcctctcctcccgttcaatggaaaagcgttttggcatgttctcgtgcgcacgtccgttccagggggaaaagtcaggccgagcatcgttcatccgagaaaccgctccagacagccgtgaagccggcattcgaagaggcttttccccggggaaaagcctctttttcaataatcgaattccggtctttgagtaccgatgcctctgtattcattggcagagatcgcgactgcccggaggctgcagatgttgttctgtctactgatcggatagacgacatacagcatttcgcggccgtacgggtcaatcgttgacgaatgaaggaaaacctcagttcctctccgccaaaatctcgtattcgccggagctgtaataatctgcccttcataaggctcataaattctctgttcataatgcgcagccggctgataaggggcgtatacatcttcaggtgcatagccgggagcgggggtgtagggataacgatttggatacatatgataacctctttcccacttcgttttttggttttcatctttaagattatattcaggtaaatgcctatttgtatgggcgaaaatctcagcttttcggctctttttttattgaatggacgttgtgtatgcctatttctatcaagcgctgttttctgttattctataatcaatagaatggattagttgtttagggaatcatttcctttataaatcaagaaaatttggacaaatggtggtttagtttttaaaacgaaatgttataatacaacataagaatcgcactatcatgaagccggaagatgcatcgggcagcaaccggagcgccccttgcacctttgtcgatagagaaagagggaatgacaattgtttttacacggtactagcagacaaaatgaaagagggcacctcgaaatcggcggtgtcgatgttctatcattggcagaaagatacggaacacctctttatgtatacgatgtcgcgctgattagagagcgcgcccgaaaattccagaaggcattcaaggaagccggtttaaaagcgcaggtagcgtatgcaagcaaggcgttttcatcggttgccatgattcagcttgccgaacaagaggggctgtctctggatgtggtatcgggaggagagcttttcactgcgatcaaagcagggttcccagctgagcggattcattttcacggaaacaataagagccctgaagaactagccatggcgctggagcatcaaatcggctgcatcgtgctcgataactttcacgagatcgccattacagaagatctttgcaagcgatcaggacaaactgtagacgttttgctcagaatcactccgggagttgaagcgcacacgcacgattatattacgacggggcaggaagattccaaattcggttttgatctgcataatggacaggtcgaacaagccatcgaacaagtcctccgctcgtctgcgtttaagctcctcggcgtgcactgccacatcggttcgcaaatttttgatacggcaggatttgtccttgcagcagacaagattttcgagaagcttgcggaatggcgggagacttactctttcattccggaagtgctcaatcttggcgggggcttcggcatccgctatacaaaagacgacgagccgcttgcagctgatgtttatgttgaaaaaatcatcgaggcggtcaaagcaaatgccgagcatttcggctttgacatccctgagatttggatcgaaccaggccggtctctcgtcggtgatgcggggactacgctgtacacgatcggttctcaaaaagaggtgccgggcattcgcaaatatgtagccatcgacggcggcatgagcgataatatcaggccggcgctttatgaggcaaaatatgaagcagccgtcgccaacaggatgaacgatgcttgtcatgataccgcatcaatcgcaggaaaatgctgcgaaagcggagatatgctgatttgggatttggaaatccccgaagttcgcgacggagatgtgctcgccgttttctgcaccggtgcgtacggctacagcatggccaacaactacaaccgcattccgcgcccggccgtcgtctttgtcgaggacggggaagcgcagctcgtcattcagagagagacgtatgaggatatcgtcaagctggatctgccgctgaaatcgaaagtcaaacaataaaaaaatggagattccctaagaggggggtctccatttttaattcaagcacgaaaaacacttcccggtgatcgggaggtgttttttgttaaaaagatcatgacatgcatagaacagcgaccgggctaattgtatataatattgtgaatttaacaaaaaatttacaaaggagatgataaaggcaatgaccagggtgaaaaggatgagatttgctgatttgttggatttagaggcggagtagatgaaaccggccaaagtatccctactccaccgattgctccagtgcctgaagcaatgtgttgattgtaacacagtaaatcgttttacagcaataaacatttttgtgaatattttattgatttcggctgtgatctcattcccatattctgctgcggcccatggcgcaacacagtccggcgatcaatattcaagctttgaagaattggagcggaatgaagatccagcttcttaccgaattacggagaagaacgcaagagtgccgatgctcatcatggccatccatggaggcggcatcgaacccggaacgagcgaaatcgccaatgaagtgtccaaaaactattccctgtacttgtttgaagggctgaaatcatcaggcaatacggaccttcacattacaagcacgcgttttgacgagccagcggcgctcgcaattactgcaagccaccagtatgtcatgtcgctccacggctattacagtgaagaccgcgatattaaagtaggcggcacagaccgcgctaaaatcagaatattggttgatgagctgaaccgctcggggtttgccgctgaaatgctggggacagatgacaagtatgccggaacccatccgaataacatcgccaacaagtcgctttccgggctgagcattcagcttgaaatgagcacgggtttccgcaaatctttattcgaccggtttacactaaaagacagggcggcgacgcaaaacgaaacgttttaccgatttacaaagctgctgacagattttattcatgaaaactatgaagaagacggaggggatttcccctctgcaaaaataaaacacccccttcaagtgaaaaaggaggtgtttcggcggttgtgttaaccgttggactctgaggtgccgccgccggtgaatacggaaacgatggcgttccacagagacacaaagaagtcgatcagtttttgaagaaagttttgtccttcttcagaatccaagaatttcgtgattttatcctttgctttgtcaagctggtctccaacctggttccagtcgatattaatatttttcatgttattaaataaagatataagagagtttttctgatcttctgtgagtgtcacgccaagttcggaagcagccgaatcaatcgttttctccaattcctcttttgactcgggaactccgtttttcgagatttcttccttgactttggccatcagcgctgacgcgttttcactgccgattttctcgccaagctctgaagtggtgacaagctcttcattcgcgacctttttcacatcttcggaaattttttcgcccgaagtcgtttcatacgctttcatcaatccggttaaagcggctgtgcctgacacttcaaacggagcggtgacatagactttggcgtcttttacaccggccgtcatcagcgcgttcaaatacatctcatctgtaattctgctgatattgtgtgtctgaacttccaaaccggtgccttttttcgctacggtaattgaagaagaagaaatcgctcttgttccaatttgtgctttcggtatataatcccctaaatatttatgctcctcatcatttgtcacctcgatgatggtcgcattttcaggcgcattcatttcttttaatactttttgtctgtcctggcttgacaagtctttccccagcgtgacgatgacatcacccactgcggcgtcagcgaagctgacctgcgggaaaatgagcagacacaatgctgtaaagattcctagtatcgattttttcaagctcaatgccctccttaaaaatgcaggcttcaggcagaattgctgtacttttaaagaagcctgccggaacggaaataatgcgttccgaaatatagacggatgaaagatgagtgaggtttcaaagaaaaaaagagagaattttctcttcaagtcaaatgccctcccggcatcgtatctcgccgctcttttatcattcatgattttcacaggcgattcaacctttttttaaaattttttacaaaaacgatacaagagcggcgtttatttcggtcgattggctctctgcttcttcaatatgatataatgacccttgtgaaatgaaaggagagaatcaagatggctaaaaaaggatacatacaactgacaaacggcaaaaaaatcgagtttgaactatatccggatgcggcgccgggaactgtcgccaactttgaaaaacttgcaaacgaagggttctatgacgggctgaagttccaccgcgtcatcccgggcttcgtcagccagggaggctgcccgcacggcaccggaacaggcggacctggatatacgattaaatgcgagacagaagggaatccgcacaaacacgaagccggttctctctcaatggctcacgcaggaaaagataccggaggcagccaattctttatcgtccatgagcctcagccgcacttgaacggcgttcacaccgttttcggaaaggtcacatcaggccttgatgccgtcacttcaatggagcagggacaaggcatggaaaaagtcgaagtatttgatgcataatcagagagcgcaaaaaacagcccgcttagccgggctgtttttttgtctgtaacggtgtttattttccaggtgcaacaggacttgaggccgattcttcgtccacatcctgataggaaataacgatgctaataaataaaataattgtgaaaaaatgaccctttatgtaaaatatattcaagtgaagagctagatagagaacgcaatctgtaaaaaaggaaggggcgtaaggggtgagcgtaaaaatcccatcgacggcagtcggcgtaaaaattaatgactggtataacgcgatacgtaaattcaacgtcacggacgccgaaatgctgaaggcagaaattgagcgcgaaatttctcaaatggaagaggatcaagacttattattgtattacgccttaatggaattcagacacagaatcatgcttgattacgtaaaacctttggaagaaggcgaaaccccgcctgacttttctgaaatattaaaagatatcgaagatgaacaaggaaagctgacaggcctgctcgaatattattttaacttttttagagggatgtatgaatataaaaaccatgattatattaaagcgatctctttttacaggcgcgccgaaaaaaagctgctgcacgtcgaggacgaaatagagagagccgagtttcattttaaaatggctgaagtgttttatcatatgaaacagagccatgtgtcgatgaactatgcgcttcaagcgattgaaacctatcaggcgcatgaaacctacacggttcggagaatccaatgcgagttcgtcatcgcagggaactatgacgatttagagtcgaatgaaaaagcgctgtcacatcttgaaaaggcgctgaagctttcacagcaagaaggccagctcatattggaaggacacacctattacaatttgggaaactgctattataagatgggggatttcgatcaggcagccgagtacttcaacagggctgctgcgatttatcaagaagagtcatcagatattcttccaaaagcgtttttcagtcttgcacttgcatatttcaagttgaagcagctggaaaaggcggatgacgcgttaaacaaaggaattgacatcgcccgccgatcagacgatgcgatctacctttcaaaatttcattttttaaaagctttgtatgttgatgatgacggcagggctccaatgctggagacatttcagctgctcgggtcaaaaaagatgtatcccgatattgaggacttggcattggaagcagctgaatactataatgaaattgggcgcttgagcgactctgtttatttctatcaaacggtattcagtgctcgaaaacaaatgaaaaaaggggactggtcgtatgaaatctaaactgttgttaaccgccgctgcttcagtagcaggactttctttggcaagtgctgcgctgatgacgcaaacagatggtgtgaaggtcgccgagagaaacgtcacatccgcgccaatgcaaatcgcagagagaaatgtaacatcagcaccggtgcaagtcgctgagagaaatgtaacgtccgcgccagtgcaaatcgcagagagaaacgtaacatccgcaccggtacaagttgctgagagaaacgtaacatctgtcaaaacgtcaccgattcatatcggagaacgaaacgtaacataatatttcagtaaaagagcagtgcttggtctatatcagcactgctctttttatgtccgctaaaaagcctcttcttccctgagcttgacctcatattggcatgcataaatcaaagcgtacaagaaatcataaggttatgaaaacatgaaggaggaaagaaaatgccgttagtaccttacgaaccatttaaacatttgaatacgatcagaagagagtttgatcgggtgtttgccgattttccggcaaactttggaggagagcacggctttggcgatatcagggttgatgtgcatgaagccgggaatgaaatcgtcgcctcctgcgatatcccgggccttgaaagcaaagaagatgttcatattgaggttgaaaacaatatgcttcatatcagcggaatcatcaacaggtcaagcgaagtaaaagaggaaaacatgcaccggaaagaacgatttacaggccgttttcacagggcagtcgcgcttcctgctcccgtcagccgtgaaggaataagagcttcttataggaacggcgtgcttgaagtgagaatgccgaaagacaagcccgacgaaaaaaagaggatagatgtggaatttcattaaggacacaaaaggtcccctttatggggatcttttttatttgtttttgaaacaaatagcaaaaaattacgtatattcttggaaggaatgctaaaattaactcatcagaactgaataaggagatcaacaatgaggactttagtactgcttagaggctgccctggcaccggaaaatcaacctggatcagggatcatcaattgaatcaatatacgctgtctgccgatcagctgaggctgatccatcagtcaccagtgttaaatttggaagggaaatacgacatttcccaaaaaaatgacggcaaggtatggaagcttttgttcagcctgcttgaagaaaggatggagaggggagaattcacgatcgttgatgccacacatgcaaaacaaagcatgatttccggctataaagctctcgttttaaagtatcgctacagagcgtatgtggttgatttttccaatgttccgcttgagaccgccctgttgagaaaccgcgagagggctgagcataagcgggtgccagacagcgtggttcacgccatgcacgagcggattttatccgaaccggcgccttcctggacaacagtgatcaagccggaagaatttgccgatgctatgcagtataagccgaggcggcttgacagctacaaaaaaatacatgtcatcggggatgtgcacggctgttttacggtgcttgattcctatttgaaaggcagactcgaagatgacgagttatatatttttacaggcgatatggttgatagaggaatagaaaacgcaaaagtcgtccaattccttctccgtatcaaagaccgcaaaaatgtgattttgctcgaaggaaatcatgataaatatttaaagcaatacgggcatgacgaagtaacaagaagcagcgtattcaacaagaagacaaaaccagaattagacgaagcaggttttgacaagagagatatcagggaactggccaggcgcttccaccaaattgcctacttcacgtatggacaagacacttacatcatcacgcacggcggcatttccgcgctccctgacaaccttctgtttacggctaccagccagctgatcaacggtgtcggcggatatgagacagatatcgaccatgtctttacgaaaaatatggaagggcggaacatcattcaaatccacgggcacagaaacatgttccgacttccagtgcatgcagctgcaaaatcatataacctggaagggcaggtggagcacggcgggcatttaagagttgtcaccattgatcggtcgggaattcaaacacacgaaataaaaaatgatgtgtttaaaacttccgctcctccgcttacttctcatcacgcgcacgaggagctgacggtcgaacattttctaaagcatttggacgaacatgattatgtgtctgagcaaaaactagccggcggcatttcctcttttaactttacgagaaaggcttttcaggagagaaaatgggacagcgtcagcatgaaggcaagagggctgtttattaatagaaacacgaatgaaatcgtcagcagaagctacaacaaatttttcaacatcgaggagcgtctgacgacgaaaatgcatgttctcgttaacacgctgcgctttccggtcaccgtctatgataaggcgaatggatttttgggaacggtcggctacaattctgaaaccgatgagcttgtcttcacctcaaaatcctatacatcaagcggacaaaaagacggccatgcgaaatgggtggaagagctgttttacaaaacgtttgacgcatctcaaacagaggctatgaaagaatatgtgaaaaaacgcaatgtttcgttagtgtttgaagtcgtgctgccagaaaaagatccgcacattatcgagtacgaatcggacaagcttgtccttctcgacattgtcaagaggcagatgaaatatgaaaagctgctgtatgaagacgtccttcgttttgcggagacattccgcgtagaatgtaagcaaaaagtcattacttttcatcagtggaccgatttttataaatggtacctgtctgtgtcaaatgacccgtcgattgaagaggaaggatatgtgattgaagactcggcaggatttatgacaaaattaaaactgcctttctatcaatattggaagttcatccgcggaatcaaacacagactcggcgcggctgctgctcgctcgccccaacacgaggcactgttccattccgagcatgtgaagtttctcgcctgggcaaaaacaaaagacagcgagtattttaaaaatcagtctgttatcgccatccgaaacgacttttacaacgaaacctgaagcgaagaagacagaacaaacggttttttgaaatgtagtgatttagactcgatttttaagcttgttttcgcaaacacccctaaatcagaatgtacattcgtaggttataagtagtatttcgtctgaatatgaaacgatttcccttcattttgcgttatacttaaaaaccacatattttccgtctgaatcgaacatgttttatttcatcattcataggaaataaacataggatagttcagaacgtgttctggaggttttgatcatggggaaaataaaattcaagctcacggttctgctcgttttggctgccgtactggccggaggcttttattatttaaaaaacggaagcgttcaggatgtctcaacggcgctcagccaaaccgtctcatctgaggaaaagaactataccatttatcaatataagatcaccaaaattgacggcactgaataccacggggtatcagataacggaacgaagatcattttcaatgcgaaaaatcttaaccaggatctgtccgacattaaagaaggagacaaagtaaaggcctacttctctaatgccaacagaatcgacggattaataaaagtcgtcaaggtggcagaataaaaaccctctgtttttcagagggtttttctgtgcaagcagttttcattgcaattttaatatgcggccgctataattacgcataaggacaagtaaatatcgattgtatccttcggggctgggtgaaaatcccgaccggcggtaataaagcgagagacagctttagagcccgtgacccgctgtgcttcgtgcaaagcggtggattcagtgaaaagctgaagccgacagtgaaagtctggatgggagaaggatgaagagactatgtaaaaaataatgaataagcatagttttatttctcatgcacaaaaacaacccccggatcaacatccggggttatttttttgaaagaagggagggaaattcatgacggatgcgcattatatgaatcttgcattggagctggcgaggcagggcgaaggccagaccggggccaatccgcttgtcggagcggttgtcgtcaaagacggcgaagtggtcggaatgggagcccatttaaaatacggcgaagcacatgcagaagtgcacgccattcaaatggcaggccgccatgcggaaggagccgtcatctatgtgacgcttgaaccgtgcagccattacggcaaaacgcctccttgcgcggaactgattattcgttccggtttgaagcgggtggtcgtggctgcggaagatccgaatccgctcgtttccggaagaggaatcgagatgctgagaagcgccgggatcgaggtggaaacaggcgttctcaaagaacaggcggaagagctgaatgaaaagttcatgcattttatgcggacaggccttccgtatgtgacattaaaagccgctgcaagccttgacggcaaaaccgccaccgcaacaggcgacagcaaatggattacttctgaagaagcgcggatggatgctcaccaataccgaaaaaaccaccagtgtattttagtcggatcgggcacaataaaagcagacgacccaagtttgacatgccgtctccccggtgcggtgaatcagccggtgcgcgtcgttctcgatacgacgctgtcaatcccgctccagtcaaaagtgattcaggataaagaagcgcctacttggatttacacgacgtccaaggcagatcccgaaaaggttcggaacgtggaaaaagaaggtgtgcaggtaaccgtgctcgatgcggatgaacttcaggtgcgcgacgtgcttctgcaccttgcagaccgcggcatcgcttcagtctttgtcgaaggaggcgcaacggttcacgcaagcttcgtcaaagaaggactctatcagcaaataatcttctatcttgcccctaaattaatcggagggctgcaatctcccagcatcctctccggtgaaggctttcaatcgatgaaagatgtccccttactgcaattcacaaccattaccaagatcggccaggatataaagctggcagcaagaccgataaaagaataaggcggtgacatatgtttacaggcatcattgaagaagtcggaacgattttggacatgaaaaaggcgggaagcgccatgtctttagtcattcaatccaacaaagtgatcgaagatgtgaagctcggcgacagcattgctgtcaacggagtctgcctgaccgtaaatgagttcggttccagcagtttcacggcggatgtcatgcttgaaacgctgaaagcaacatcactcggcacattgaaaaaaggaagccgcgtcaatcttgaacgggcgatggcggcaaacggccgcttcggcgggcatatggtgtcggggcatgtcgacggcactgcatcgatcgttcgcatagaaaaagcggcaaacaccgtatactatgatttaaaacttgacccttcactggccaaaatgcttgtgttaaaaggttcgatcgccgtagacggcgtcagcctcaccatattcggactgacggaggatcaggtaacagtctcgcttatcccgcacacattggatgaaacgatttttcctgcaaaaaaggtcggaagcatcgtcaacatcgagtgcgatatgatcggcaaatacatttaccgctttctccaccaaacaaaacaagaaaaacaggcacaggcattgactgaagcattttttaaagaaaacgggttttaaatgaaaggaggctgtgcgtctatgtttcacacaattgaagaagcgattcgcgatttgaagcagggaaaagtcatcatcgtagtcgatgacgagaacagggaaaacgaaggcgatttcgttgcgctggcggaatacgcaacacccgatgtaatcaactttatggcttcgcacggaagggggttgatctgcgcgccgctcaatgaagagatcgcttcccggcttgagctccacccgatggtggacgaaaataccgattctcaccacacagcatttacggtcagtgtcgatcaccgcgatacaaagacggggattagcgctcaggagcggtcgctgaccgtcatgtcgctgatcgctgatcacgcgcatccgggtgattttaaaaggccggggcacattttccccctgatcgcgaaaaaaggcggcgtattaaaaagagccggacatacggaggcggccgttgaccttgcagaagcgtgcgggtccgcgccggccggcgtcatctgcgaaatcatgaatgaagacggcacgatggcaagggtgcctgaactcaaaaaaatagccgatcagcacggcttgaaaatgatcacgattaaagatttgatcgaataccgctacagcaagggaacgctgatcaaccgggaagtgaaaattacgctgccttccgaattcggtaccttcaaggtttacggctatacaaacgaaatcgatgacaaagaacatatagcactcgtcaaaggcgacatacctttcggtgacgagcctgtgcttgtccgggtacactcagaatgcctgacgggcgatgttttcggctcttaccgctgcgactgcggcccgcagcttgccgctgcgctcgcgcaaatcgaacaagcgggccggggcgtactcctgtatttgagacaggaaggaaggggaatcggcttaatcaataaactgaaagcttataagctgcaggaagaaggatacgacaccgtacaggctaacgaaaagctcggttttcttccagaccttcgcaactacgggatcggcgcccaaatcttaagggacctcggcgtgaagcaaatgaagctgttaacgaacaacccgcgaaaaattgcaggtctcgaaggctacggcctgacgatcgcagacagggtgccgctgcagatggagacaaaaaaagataatgaaaagtatctaaaaacgaaaaaatcaaaattggggcatatgcttcatttttaaactaaaatcaatcacaaaaaaggacgggattcatatgaataaaatagaaggtcatgtaattggaacagatttgaaaattgggatcgttgtgtcaaggttcaacgattttattacaagcaaacttctaagcggcgcagaagacacgctgttgagacatggggtcaaagctgatgatattgatgtcgcctgggttcccggcgctttcgaaattccgctcatcgccaaaaaaatggctgaaacgaaaaaatacgacgcagtgattacgctgggcacggttatcagaggagcgacaagccactatgactatgtctgcaatgaagcggctaaggggattgcagcgagcagcatgtcaacaggcgttccggtgatcttcggcgtattgacgacagacacgatcgagcaggcggtcgaacgcgccggaacaaaagccggaaataaaggtgcagaagctgccgcggcagcgattgaaatggcgaacctgacccggtcgcttcaataattgccgaaaaagagtttaaaaaggttataaaaatgtttataatgtgatgtgaagcgactagccttcgttagatccacattttgatatattgaggggtatttatgttaattcgttataaaaagtcattcgaaaagattgcgatggggctcctttcgtttatgccgaatgagaaggacgtcaagcagcttcagcagacaattaaagactatgaaacggacactgaaaggcaactgttcctatggaaagaaggcgaggatattgtcggctgtgtaggagtagagaaaagagaagaagaagtcgagatcaagcatatcagtgtaaatccgtctcaccgtcatcagggaatcggcaaaaaaatggtgtcggctatttcgccaatatttgctcctaaaccgctggttccgaatgaattaactaaaggattctttgagcgctgtcaggatcatgaaaatgaagacatcacatataaccaatgagcagaggcttctagcctctgctcttttttcgccgcttgatttgtttatccctctcggcaattacttcagtccggtccctcagccggtgtttatcaatgataaaggcgtctggtgcagcgtttgctccccactcatatgactttttctcacattgtttccggcatgctttgatcaatgcttcatctgcgatcgggagcatgatgctttcataaggggaatgggcttcgattttttggtgagtccgccttaacagttcgatgaagcggctgtaatccaatccgagcgattcaactgcgtctttttcggacgccaggatgcgaatgctgttcgccattaatctctccgcgccggcaaaattgtttctccgctgatgatagagcgcgacagccagctgaatcaacccgacccagtgtaatttccgctcgccgggagggtcctttttccaatggtcttctagaatttcgtggcactcaaaataatcccttgccccgtggaattcggcgaggtaatcgatataagcttggggatacatctgacatcctcctttaagtttccgttaaagtgtatcataagaacggaacggaggaaaaacggctgatatatccaggctgtgaaaaaagcgcccggtaacggacgcttctcatcttttatgttaatagatccatgccgctccaacaataatcaacaaaataaacagaacgacaatcaaagcaaatcctccgccgtagccgaagcctttacctcccatgttgttccctcctcagatttaagattttacacggtattctatgcagaatacactcaaaccgtataggcggatgccaaagcttcttaaattatattggacttcatgcagacgcgtaatttatactaaagggtagccagttttagccggcttagaagcgattttgaaaatggtgagaaatgaacatggaatatcaggtgaaaatcgaggcgtttgaagggcccctggatctgctgctgcacttaatcaaccgccttgaaatagacatttatgacatacctgttgcgaagataaccgagcagtatttattatatgtgcacacgatgcgcgaacttgagctcgacgtggccagcgagtatttggtgatggctgcgacccttctcagcatcaaaagccgaatgcttcttccaaagcaggaagaagagctgtttgacgaagagtttctcgaggaggaagaggatccgagagaagaattgattgaaaaattaatagagtacagaaaatacaaaagtgccgcgcaaaatttaaaggagcgcgaggaagagcggcaaaaagcattcgcaaagccgccgagcgatttaagcgactacgccaaggaaatcaaactcagcgagcaaaagctgtccgtcaccgtttacgacatgctcggggcgtttcaaaaagtgctgaaccgcaaaaaaatcaaccggccgtctgaaacaagaatttcaagacaggaaataccgatagaagagcgaatgacgcaaatcgtcgactgtttgaaatcgtcccgcaaaaggatgcattttatggaactgttcccgtatgaacagaaagagcatctcgttgtgacgtttttggcgattttggagctgatgaaaaaccagctgatcatcattgaacaggaacacaacttttcagatatttacataacagggagtgaagcgattcatgacgcttgatatcgtgaattggaaagccattgtcgaagcgcttttgtatgccgccggcgacgagggcctgacaaaaaaacagctattatccgttttggaggtcgatgaagccgagctgctggatattatgcttgatgtcaaagaaacctatgaaaaagaagacaggggcatcgagcttgtcgagtatgcggatacgtacatgctttcgaccaaaaaagaattcgccgtctatttgaaaaagctgatcgaagccccttcaaaagggctttctcaggctgcgctcgaggttttggccatcgtctcttataagcagccgatcacgagagcggaagttgaggagatcagaggggtcaaatctgaacggattcttcagagcctggtcgcaaaagcgctgttatgcgaagtcggacgggcggatggaccgggcagggcgatcttgtacggtacaacagaaacatttctggaacaattcggcttaaaaacgcttgaagagcttccgccgctgcccgaaaatgtagaagaagacggggttcaggaagaagccgatctgttcttcgaaaactttaaccagacgttcgaagatttaaaatagattcaccttaaggatcgaagtatgataatatatattatcgtattttttatgtttaatttcattcatgaaagaatacgattgtaacaaagcgatgaggagagggtgccgacaccaatgggaaaatctatggcaagagcccaaaccgagcaggcaggcgaatttttagcacagaccgttcagacgctgtgcgattatttaaacgaaacgacgctttcatcccttgaagccgaagagcccgggagaagagattattatcgcgatgtcctcagcaacttgagaaaactggcggtttactgtgaagaagggcttgcggcctgccgaatcaggctgcagcaggatccttttcaggaggctgcagccgaaaggacgctctatcaggtctatcatcgatgcatagaagaattttttacaccgaaaaaagatacttggtacgaagacagcagagcggcctacacgggaaaaaacgccatttgctttcacgaaccagcgccggcctcattaaaaaatttgatggcttcgcttgaaacaggatatcaatcgatgagagaagaattggaatactatgcgactgactatcgaatgaagatggttcagccgagatcatagcttaaatgaaccgtgagccggaactccccctttcatgaaagggggggtttttatcttgctttagatttttctcgggaaatcatccaattggtgttcataacaaaaagacaagcgcataaacttgtacaaacaaccacaaggacgtgagaaaaaatgcgcttttttctaaaacaagcggcagcagccatcatgatatgctctcttttatgctcttcatacgaaaccgctcaagcacagccctcccttcatatcagcgcaaaaagcgcgattgtcatggacgggcaatccggacgggttttgtttgcaaaggatgagcatgaaaaacggcgcattgcaagcattacgaagattatgacagccattttggccgtggaatcgggcaaattggatgagacggtcacggtcagcgacagagcggtcaggacagagggatcatcgatctatttaacaagcgggcaaaaggtgaagctgaaggaccttgtttacggtttgatgctgagatcgggaaatgatgcagccgttgcgattgccgaacatgtgggcggaagcctggaaggctttgtctacatgatgaatcaaaaagcggccgagctcggcatggaaaacaccctgttccgcaatccgcacggacttgatgaccaccctgatcactattcctcggcctatgatatggcgcttttaacaaaatatgcgatgacaaatgaaacgtacaaaaaaatcgccggaacgaaacgctataaagcagaaacgatgcaaggcatctggagaaataaaaacaagcttttaacagggctttacaaatacagtacaggcgggaagacgggatatacaaagcttgcaaagcgtacgctcgtctccacttcatcgaaagacggaaccgatttgatcgccgtcacaatcaatgcccctgacgactggaatgatcatatgaacatgttcaactatgtattcggccactacaaaacatatatcatcgccaaaaaaggcgagattccgaaattaaaagactctttttacggaaataaagcttttattaaacgggatgtcacatatcttttaaacgaagaggaaaaagaagatgtgaaggttgatatcgagcttcttgaaccgaaaaaatcatggcgtaaaaacaaaaaagaaatcccggacatcatcggagaaatgaacgtcatgttcgacggaaaaacgattgcaagcgtaccgatctattatgaaaacgagcgaaacaaaaaaccgaaaaaatcgtttttcgagacctttcaatccgtattccaaaaagcggcgggcggttcatcatggtcaatataatctgggtcggcttaacggtgatcggtctggtgtttgcgcttttcaacggaacggttcaggaagttaatgaagctgtatttaaaggatcgaaggaagccgtcacgattgcgatcggactgatgagcgtccttgttttttggctggggctgatgaaaatcgctgaacagtccgggcttctcgaaaaattcagcaggctgtgccggccgttcatttcaaagctgtttcccgagatccctccggatcatccggcgatgggatatattttatccaatttaatggccaactttttcggattgggcaatgcagcgacaccgctcggtattaaagcgatggaacagatgaaggcgctcaaccggaaccgcagggaagcgagccgctcaatgatcacctttctggcggtcaatacgtcaagcattaccttgattccgacgaccgtcatcgcggtcaggatgacatatgatgcaaaggcgccgacagacatcgtcggtccgaccattttggcgactttaatatcggggatctttgcgatcttcatcgaccgatacttttattatagaagaaaaaagaaggggtgagcatttggaattcatcaactggctttctctggcccttatcccgtttatcatcgccacgattctgctatacggtacattcaaaaaagttccgacttatgaagcgtttgttgagggggggaaggaaggaatccaaattgcattttccattatcccttatttagtcggtatgcttgtagcgatcacggttttccgggcttcaggggcgctcgatttttttatgaatcttttaaagcccgtgttttccgccgtgggaattccgacggaagtggttccgctggctctgatccggccgatttcgggaacggcagcgctcggcatgacgaccgatttgatcgccgtttacgggcccgattcgttcatcggccggctggcctctgtcatgcagggatcgacagacacgactctgtacgttttgaccgtctatttcggagcggtcggaatcaagaaaatgggggatgctttaaaggtgggactgcttgctgatttagcgggggttatcgcgtctgtaattattgtaacattgctgtttggaagcgcctgatcaacaggcgctttttgctttttagccaaaactgttttacttttgaggtgagaaaggatacatttaagggcggagtgctactttcctaaggaagaaggcgcctcgcaaacttgtttgttggtctggaaaaaagtaagataatacatgaggtgaaagatatggaacgacttcaaaaagtaatcgcccacgccggtatcgcatcgaggcggaaggcggaggagcttataaaagaagggagagtcacggtcaacggcaaaaccgtcagagagcttggcgttaaagtatcaagctccgatcggattgaggtaaacggcatccagcttgaaagcgaagaacccgtttattttctcctgtataaaccgagaggggttatatcagcagttaaagacgacaaaggccggaaagttgtgaccgactttttcaccgaggtggaggagcggatttatccgatcggaaggcttgattatgatacgagcggcctcttattgctaacgaatgacggggacttcgccaataaattgatgcacccgaaatacgaaattaataaaacgtatgtagcaaagctgaaaggcattcctttaaaggagaatttaaaaaaacttgagcggggcgtgcgccttgaggatggaaagacagctcctgcaaaagtgaagcttttgtcgcttgataagaaaaagcagacaagcatcgtccaaatcacgatccatgaggggcgaaaccgccaggtcaggagaatgtttgaagccatcggacacgaggtgctcaagctgaaaagggaagagtatgcttttttgaacctggcgggcttgaaaacaggggaaaaaagagagcttacgcctcatgaagtcaaaaggctcagggcattggcagaacacggtaaagcggctttctaaattttcacacaaccttcaaaaaaggcaaatggcagtcagtcttgagatgatataatgatactgaatgtctacatgagggggcggattatgaaaaaaaagcgtttttacattcggacaggcatcctccttgtgctgcttgcagcgcttggctacacgctgtacagcgccgtgtttcaaaacacggagagtgtggcggtgggggaaaaagctcccattttttcgctggaggatgttgacggcaaccgtctcaaactggacgaactaaaaggcaaaggggtatttttaaacttttggggaacatggtgcgaaccatgcaaaagagaatttccttatatggcgaatcaatacaaggtgtttaaggataaaggggtggaaatcgtcgccgtcaatgtcggcgaatcgaacctcgccgtccgaaactttatgaaagaccacggcgtcaattttccggttgtgcttgataaagacaggcaggtccttaacgcatatgatgtcacaccgctgccgaccacgtttttgatcaaccctgacggagagattgtcaaggtcgtgacgggcgagatgacagaacggatgatccacgattatatgaatatgatcaaaccagagggatcgtcatgatgaaagaaatcaaatgcgaatgcggccatgtgaatccggcgggtaccgttttgtgtgaatcgtgcggaaagccgctggtcaaacaggatgccaaactccttgacatgcggtatgacggaagtgcgagacgctctcaaacctataataaaacgatcgtagataaaatatggaatttcttttcgtctgtaaaggtcggcgtctggctgatcgtcattacgctgacagcatccgcttttggaacgatatttccgcaggaaatgttcctgccgccgggtgcgcaggctgatacatactacagcgaacaatacgggcttctcggacaaatctattatgctctcggttttcacaatctctacggttcatggtggtttattattctggttgcctcaatcggcatttcgcttgtcatctgcagccttgaccgggtcgttcctttgtacagggctctgaaaaaccagggcgtcacgcgaaatccgaactttatggagaggcagcgcctattcagccggacggaagcggacatgtctgaggacacaaaatcgcaaatcatcggtaagctgaagaaaaaacgataccgcgtcaaggaagaaaacggcaacctatttgccgaaaaaggccgtttttcaaggtggggcccatatgttaaccatatcggactgattatattcctcatcggggtcatgctcagatttgtcccgggcatgtatgtcgacgaaaccctttggatcagggaaggggaaacggtgccaattccgggaactgacggccattactatttgaaaaacaaccggtttataaaagaaatgtacgacagtgaaaaagaaaaagaagtattttcagaggcgatcaccaaagctggtgacgggactgtcgcaaaaacatatcaaaccgatgttgaactgtatgaaagaaaaaatgacagcctgccgggcgaagcgcctgaattgaagaaagtgaaaaacggcaagatcaaggtcaatgacccgttgaaattcggttcatatgcactctatcagctgacatacaaggaaggcgagctcgacagaatggtgtttcagctgattgaaaaagacagcgggaaatccttcggcaaagtggcaatcgacctcttggagccgaaaccggaatatgatcttggtaacggttacaaagttcatatagcaagctacctgccggacttttattttaacaaagacggggaaccgagcacgaaaacgaggaatccgaacaatccggcatttgtattccagatcaccgcaccggataagcctaaaggagaaaaaagtttcgtggcgattcaggaaacaatcgaaggttctgacgacaataaatacaaaatgaagtttgaccatgtcgaaacgaagaatctctcaggcctcacaattagaaaagatttgactttgtgggtgctcattgtcggcggtgccatctttatgatcggcgtcattcaggggatgtactggcaccatagaaggatctggctcagaacgctggacgggcatgtgctcgtcgccggacatacgaacaaaaactggtacgggctgaagcaggacttgaaggccgcgctcgcggatacggggatatccgaaccggccgatcaaaaagaactgtcaaaggaaaaaaaataaacggccagcatagggaggggttttcatggcagagttaagcggcaatttattgtacgcggcatttctcttgtatctctcagcggtcttcttttttggcggctccatcaggagcaaggcttcagaccggaagaagaagaaccgctgggcatcgatcgcagtgttgatcacgatcatcggatttgtatgccagtttggatattttattgcgagatggatcgtttccggacacgcgccggtcagcaatctctttgaatttacaactgctttcagcatgatgctcgtcctggcgttcatcatcatctactttatttacaagctgtctgcattgggactgtttacgcttcccgttgtcctgcttttgatcgcatatgccagcatgtttccgaccgatatcacaccgctgattccgtcgcttcaaagcaactggctgtatattcatgtcacgactgcagccctcgggcaggcgattctcgccatcagctttgtcgccggcgtgatctttctgctcaagcatgtggatcattcaaagccgggcaaaaaaacgttctggctcgaatgtgtcatgtttatgcttgtgacaacgctcgcgtttatccttgtgacgacctcattccgcattgggggctatgaggcgcagtttaagtggattgataaagacaaccaggaagacgtcatgatttacgagcttcccgctcttatcggcccgaataaaggagaacttttaacggaggagagaatggagccgcttgtcaatgtgccgcccattttttcaggccggaagctgaataccgttctctggtcgtttggaaccggcgccttgctttacggtgtcatcaggctgatcatcagaaaacgcatcagtcagcttcttcagccgctcgtgaaaaatgtgaaccttgaccttgtcgatgaaatcggctatcgctccgtttcgatcggctttccggtttttacgcttggcgcgcttattttcgcgatgatatgggcacagctggcgtggagcagattctggggctgggatccgaaagaagtctgggcgctgattacatttttgttttatgcagcttatctgcatctcaggctttcgagaggctggcacggcgaaaaatcggcgtggctcgccgtcatcggttttgccattattatgtttaatcttatttttgtaaaccttgtcatcgccgggcttcactcttatgcatgatccgtgcggtgcaggaaggtccgggcttttcaccgggccttccgcagctttttgttttaaattgaggaaaggcattcttggcttggcttacaatcgcttttctaataaaatgaatgtaagaagattcaaatcaggaggtttacgatggaacagacgaaagagacaaaaatattagtagtagatgatgaggcaagaatcagacgacttttaaaaatgtaccttgaaagggaaaactacaagatcgaagaagccgagaatggcgatgaagccatcgacaaagccctcggcaacgattacgatttaatcctgctcgatttgatgatgccgggaaccgacggcattgaagtatgccgccaagtacgcgataaaaaagccactccgatcatcatgctgacggcgaaaggcgaagaagcgaaccgggtgcagggctttgaagtcggaaccgatgactacattgtgaaacctttcagtccgagggaagtggtgctgagagtcaaggcgctcctaagaagatcatcgcaaacctcttacctgaatacggatacaacggcaaaaaatgtgcttgttttttctcacttatccattgatcacgatgctcacagagtcatggcggacggaacggaagtcagcctgacgccgaaagaatacgaactgctttactttctggccaaaacccctgataaagtatacgatcgtgaaaagctgctgaaggaagtatggcaatacgagtttttcggcgacttgagaacggtcgatacccatgttaaacgtttacgtgaaaaattgaacaaagtctcgccgaaagctgcgaaaaaaatcgtaacagtatggggcgtcgggtataaatttgaggtcggaaacgaatgaagttttggaagagcgtagtcggtaaactgtggtttaccatactgcttttggtttcatttgtcttatttatccttacgttctttctgctcgagtttattgaaaactaccatgtagatgaagcggaagctgatttgacaaagctcgccagcaaggtggccgtcatcatggaaaaccataaagaccaggagacagccagatcgattacatgggagcttgccgatgaactgacgagcatcgccgtcatcaaaaatgagaatgaatattggtattcaccgcgggaacatcaaaaagtggcttccatcacattaaaagatattaaaaacgatccagatctgaacgaagcgcttcgcaagcatcaaaaagtgcagaagaggacggttatctccaatcaaaagaacgatcagctgattgtcggcgtaccctacgggaaaggcgaagatgaaggcatggtgtttctttctcaatcgcttcttgccgtcaaggatacgacacagcatacgacgaggtatatcctctttgccgctgcgattgcgattgtgttaacgacgattttcgctttcttcctctcaagccggattacctacccgctcagaaaaatgcggcagggtgcccaggacttggcgaaagggaagtttgatacgaagattccgattctgacccaggatgaaatcggcgagctggcgattgcctttaaccaaatggggcgccagctgaagtttcacattacggcactcaatcaggaaaaggagcatttgtcgaatatcttaagcagtatggccgacggcgtgatcaccattaatatcgacgggacaatccttgtgacaaaccctccggctgaacgctttttacaggcttggtattatgagcagaacatgaatgtaaaagaaggccatgaactgcctcccgaagcgcgagagctttttcaaaacaccgtcagcacggagaaagagcagatgattgaaatgaccctgcaaggcagaacatgggtgctgctcatgagtccgctgtacaatcagtcccatgtacgcggagcggttgccgtgttgagggatatgacggaggaaagacggcttgataagctgagaaaagattttatcgccaatgtcagccatgagctgagaacaccgatttcgatgcttcaagggtacagtgaagcgatcgttgacgacatcgcaagctctgaggaagaaaaaaaggaaatcgcccaggtcatctatgacgagtctttaagaatgggaaggcttgtgaatgatttgctggaccttgccagaatggaggcggggcatatttccttaaacgttgaaccggtggagctccgcgagttttttgagagagtgttcagaaagttttacggagtggccggggacaaaaatattacgctttctcacaatcttgatctgcatgaagcaaaatttgtgtttgatccggacaaaatggagcaggttttaaccaacctgattgacaacgcgatccgccatacaaatgccgggggcaccgttcatgtcgatgtgcagtctgctgaaagcgggctgaagattgccgtgaaagactccggcagcgggattcccgaagaggatctgccgtttatttttgaacgcttttataaggccgataaagcaaggacgagaggaaaaggcgggactggcctcgggcttgcgatcgtcaaaaacatcgtcgatgcacacaacggatcgatcaccgtccacagcatgctgaacgaaggtacttccttcacgttctacattccaagaaataagcaggatgatggccaaatttgacgaagaatcttgttccatacgaaacaaagagcacctgttcatacagaacaggtgctcagttatttgagggcaaaatgtatccaatttgtaaaatttctgtatatcctgaaacgtttatgcctttgtagccgatgaaagagtgagaatttcaggaagacagatgagcgtctaagaggagatgaaagaagaatttaggacaaccgcaaactttatcatagtgaaaaccgcatatggaaatggccgctcccgttctggtaatctatacaaggcggttcgctttttactgcacacactaaagtccgccagccattcccaataagagtgggatgactgaagggctgtcaaatgaagactttggtttggatttatgtataatctctatagaaggatgcgagaaacaaaagagaatttttagataaaataagcatgaaacagggaatgagtgatgactgatggaaaaaacaaaaatactgattattgaagatgatgaagcaattgctgatttgctttcatacgggctgacgtccgaaggctttgaaacgtgcacggtcaataacggttcttcaggaatgaggaaactagatcagttcaaacctgaccttctgctcctcgattggatgctgccggactgcagcggattggatatttgcaaaaaagtgaccgaaagctgtaatattccaatactgatgattaccgcaaaatcagatatcacggataaaatactggggttggaattcggggccgatgactatattacaaagccgtttgatctgcgcgaagttgtcgcgagaatacgcacgatccttcggcgtctggaacaagcccatcatgtgaacgaacgggaaacggaaaaagtggatgagatccggtttaaaaatattgtgatcgttccgggcgaaagactggtgaaaaaagacggggcagccgtcgaattaactccaaaagaatatgatctgctaatgactttggttgaccatcggggaaaagtttttacccgttcagagcttttggaattcatctggggatacgattttttcggtgacacccgtacagtcgatacccatattcaaagactccgcaaaaagcttgatgcaagcgacttgattaaaacagtgttcggcatcggatataaattcgagaagcaggaggagtagagagtgttacggaccatcaagggcaagtttattgttggcttttttctgattttttctctctctttccttgtgctcaatcacacggttaagaacgtcatttggtcgagtaacgaaaaaattgtaacatcggatttagtcgaactgaaaaaaaacagtaccgtctatgtaaaccaagcatttttaatcaatcactataaaaacaatgaactttatttcggtgatatggccgatgaaatggtagataatttaaatcactccacaggaagcaatgtcggtgtttatacagtagatggcgcattgttgtcttcttctgatcagaaggtgttttccagagggagtgatgaagatcttcaacaggcgatcaaaggaaagaatgcctatcatatcacctataaccggaataaagcaaaagtgtttttctcatatccggttgtcattgaaggcacaaaagtaggcatattacgcttttcgaaaaatttcgacctgctgtataagcagagcggagagattctggatattgttttttatatcgcgcttgcaatatttgtggcggcgttccttttctcctatatcctgtccagacatatcacgattccgctcgtcaagctgacagatgccacctcacaagtcaagaagggtaagctggatatggatatccactttaatagaaaagatgagattggccagcttgccgtcaactttaacgatatgatcagcaggattcgggaacaaattttaaccatcgaaagggatcgcgaccgtctaaaagaacttaacgaacaagaaaaacggttttttgataatatgacgcatgagctgaaaacacctctgacttccatccaaggatatgctgagatcataaaagataaaggggaagcggaccggaaattttttgataaaggaatgaaccacattgtcgaagaaagccggcgcctgcataatttggtgatcaagcttcttgaagtatcccgggaaacgtccaagagtgctcaatttgacaggatcgacgcaggcgaaattttaaaagatgtttgcgagtcgatgaaatttcgggcagaacggtataagaaaaggatcacctgtgacattgaagatggcctgtacgttcttggtgaggtgagcaggctgcgccagctttttatcaatctgctggacaacgccatcaaatacagcttatctcattcggaaatcatcattaaggccgaaatcgttggagaaaacattctttttacattcaagaatccaagcgatccattggaaaatgaccaacacaccaaaatgttccaacctttttattcagtcaatcagaagattaaggaagaaggaagtgtaggtttgggattaagcattgtgaaaacaattgttgacgaacacggaggaacaatcgagatgttctacaaagaaaaccacacagtgattcaagttgaattagcttacgcaaaggttgagaaatgatgaaaaacaaaccgtttattatatgggcaggagtgctgctgtttctgatcattatcgtgtccagttataatgtcggaaaaagatcggaaacgattattatcccaagcggggaagaaaatcatatctatgaccagaagacccgcccttttcaagtcaatacgatctatcgtcttccaaaagtcgggcagctgctcgggtggtcttcaccggattccgttgtcggttttttcaagggagaagggacatccgaacgtacagcgcacagtcttcagcgcctttcctccccctatgaaaaagctgaaatcgtaaaaggcattgaaagcaacacgtccaacctaaaaatgtctccagacggaaagcgtatcgccggagtcactttgtcattaagtaaggcatcaatgcagctgttttcgccggcgagcgggaaaaaaacagaaatcgccagcacctccgccagcaatgaggtctatgtccaagatgtttcatggtcaaataatagcagatacgtttgctatcttgttttagatgtcgggcagggggatgagaccggccttcgtgtttatgatacggcttccggaacgcttaaaacgtattcattgaatgattttgcggagaaggattcgcttaccggagttaacatctccgataatggacgagatttgctgtttaccgtgttgcagcgttccgacgagtacgggatcagaatgggaaccattgacggcagccgcattaaaatcgaggacaagcgtctggacagccgcggcgggcctgtttggttaaacaatgatcaatttgtattcctggacaccggggaaaccctgtgcgaatatgatcgcagaaacggagagctttctgctctgctcgataaagtaactgtttttaaattctcaaacgactttaagaaaatcgcttactctttaaaggatgaagacaatatctatgcaggtaagcttcaggggaaaaatatcctctatgaagaaccgatataccacggcaccatcccttcggaaatattttggagtccggacggcaacagcctgcttgttaacgctcaataccagtaccctgccatggagagtgcatccgtgcgatttttagaagagcaagcttatatcatcacatttaaataattgttcgttctccactttaatatcaggcaaaaaaaccttatttcggcatttaatttaaccgaaataaggtttttcttttgtaaagacttctttcactttttttgcagggtaattagcctgattatcattcctcaaaaaatgatgtttttcttctttttgtgacattttgtttacaagttggtcgaacttctgcgatatcttcctcttatatttaaagagcatccttcttatagaactttgtcttcaaaaatagcagcttaaaaaattgtcacttgtgagtgacgagtttaaaagaaacctagtgattgttaattaaagtctaaggagttggaaaaagtgtcaaattcaccaaaagaagatcataaattgagcgcactaggaaaattagtgctaggtatgttgattgtattcggtgtgactttgttatgcatttcttggaatgcgcttgccggcccaaagcaggaaccgataaaagaaaattccgcggcttcagcatcggtgccgggaggcaaacataaagcagagaaaaaagaaagtaagcaaacagcgccggaaatcggaaaggtcgtctatttgtcatttgatgacggtccgaatcctgcggcttcagataaaatcttaagtttgctcgataagtatcatgcgaaagctacatttttcatgttaaaaccgaatattgaacaaaatcccgatattgtgaagaaaatggttgaaaacggccattctgtcggctctcacggagtgacgcatcaagtatcgaaaatctataaatctcctgaaagcttcgcggcagaaatgaatgatacgcttaaagccatcaaagaaacgaccaacgttgacacacatttgatcagatcgccttacggatcaaagccctatatcaccggtccatttcaagaagtcattaagcgcgaccattttaacctttgggactggactgttgattcagaggactggaaatctgcaaatacaaacggtcaattcgtgaataatgtgattcagcaagtcaataacctttccggtgttgagccgctagttgtattgatgcatgaaaaaccgacaactgcggcccatttagagaaactattgaaatacttccaagaaaacggatatgaaatgaagcccattcatgattcgataaaaccggttcatttcagatggaattaaaaaatatgagatgcatcaacaaggaagggatactatggtaaaaatgagaaaaggaaaactaaagatgaaaaatgtgatattgtttgtcctcgcgctagtgataacgatcggcagtgtggtgtcatacgggatttaccgtacagtcgccaaatcaataaatggaatgtacgaacctcttcatcgggatgccgagcagaaggatactgctccgcacgatcctatatccattcttttattggggatagatgagcgccccggtgataaaggacgcccggattctatgattgtaatgactgttaacccgaagacaaagaaaacgacaatgaccagtattccgcgtgatacaagggtgtttatcaaatcaaaaaataaattttcgaaaatgaattcggcttatacgtatggcggaattgaaggaaccgttgaaactgtagaacaatttttgaacattccaatcaattattatatcaaaatcaatatggatgggtttaaagatatagtagatgcgattggcggcgtaacggtggataatcggattgatttcacccttgaaggcgtgcatctgtcaaaagggaagcagcatcttgacggcaaaacagcattgacatatgcccggatgagaaaagacgatccccgcggtgattttgggcgtcaagagcgtcagcgtgagattatcaacgaaattattcatgaaggtgcacaattaaaatcattaacaaactatcaggagattttggcagcattagaaaaaaacatcaaaacaaacttaacactggacaagatgatcgatattcaaagttcttataaagaagctgctaaagatattaagcaggtagaaattgaaggtgaagacaaaaaagttgacagcttatggtatcacctagtgactgacgaaaagagaatggagatttccaaaaagcttcgccaacaattggacttaaagtcataaacggattgaaatcagttcatttcagcggatccgcaacgctccggtcaggagaacgaaagccttgtaagggcacagcttagtgaaaatgtgggctcctataaccttggcacctgttcatttagaacgggtgcttttgtgcttgttaagttaaaattaagcttaactttcgcaaaaccccctttccattttcatatgttcgtaatatagttgtaatagttgtaatgtaaccttttaagattgacaaacgacaataaattgaacggaggggtttcaggtggaagaaacctttcagaaaatatatgatcagtatcatcaggatttatttcagtttttattttatatggtaaaagacaaaaatcaggcggaagacttagttcaggaagtatacatccgcgtcctgcattcttacgaaacatttgaaggcaggagcagcgaaaaaacctggcttctttcgattgcgcggcacgttgcgatcgactggttcagaaagcagcagacgatccgccaacggattttggggacgtttgactgggagaaacaagatgtaaaagaccgcaagcctctgcctgaggacatcgtgatgcaaaatgaaaacctaaaggaaattttcgaggccctagacaagtgtacgcttgaccaaagatcagttatcgtcttgcgttttattcaaggatattcgatcagtgaaacagcaaaagccttgaatttttccgaaagcaaggtaaaaaccactcagcaccgcggtctgaaagtgcttcgtaaacagatggagcttttgaaggaggatccaaagaatgaagaagtcagaatggaacgaagaacggctgaaggcgttactaagccaacttccaacggttaaggataatcgttcggcaaatcagatctatcaaaagctgattctcgcaccaaagcgtaaatcaccgaaaaaacgggtcggcgcatttgctgctacagttttggttctctttcttctgatgctgatcactccccagttaatcgaacagatcagaactcaaaacagcgccgacgccaacatttcttctgacggaaaattggtgcagacggaggctgatgctgccaagtctgaacctgcaaatacgtttgtcgtctcacagaatcaaaaagacgactatatcaccttcgctttccttgacgagtccaagtctgtcgttgtcccggtaagcctcgagaaaagcactggcatgacaaatcttgaagatgcgcttcacgcttacagccggcttggagtggaccagtttacatcatttgacacagcttaccttgataaggtgaagttcaaagagcagaaaaacaataaaaaactgaagattcaagttgatgagaaaataccggagctatcagtcgaagatttcgaacggctgaaaaatgtgatcaacgaaacctttaaatggggatcgtatgattctgttctgtttatttccaatgataaatcgggtgttgaatttgaaacattcggaatgctcgccgatatggcgattatgcaccagacgcaaaaatgctactatttatatgaaagctcagacgggcgccggttccttgcaccttcaagcgaatcttacgaatcggtgcaggaagcgattaagatgatgaaaaacgaagaaagcggcactcatttaaaacccattttatccgatgatacgccgattgaagatattcaaaagaatggaaaagaactgatcattcaattttcttcctccgcgaatattgagaataaacccgaagatgtcttgatggtggaaggccttctattgaccgcgaaagatttcggcttcacaaaagtgaaatttaaaaacgcatccataaccaaggtcggcgcctatgacctgtcgaaatctgtacaggttccgtacgcaccgaatccgatgacgatagaaaactaaaagactccctgtgcggagtctttttttaatgtataaattgtattgatttggaagtatactaagctgtctccgaatagggggcaattttaccgaagatgcatgtaataggaggatatggaaaaccttgaagaaactcagacatcaaaacttcctgttcgcgatcgcatggctttcgggattggcgcttttcgtcaatgccccgggggcggaagcctcagagtggattgaaccgattaaaggagagatcacagatcaattcggtacgagaggcggaaagcataaggggcttgacatcgctgctcccgaaggggaagcagtagcggcagccgcagacggaacgataagcaaatcgtatcaatccgactcctacggccaagtgatatttattaaacatgacaacggatatgaaaccgtttatgcccacttaagcaaacgcctgaaaaaggaaaaggagcgggtgaaaaaaggcgagcaaatcggaatcatcggcaatacgggaatatcgaccggaacccacctgcattttgaaatgcatcacggttcatggactgaagataaaagatatgcaatcaatccgctgacggtgcttcgtgaggaggcgttccggcaaaattctatccacgttcatcaaaacgccgggacaatgagcggtgcggtgaccgttcaaaaaggggacacgctctggagaatcagcaaggatagcggtatatccatcgaggagatcatgagaataaacgggttgaaacattcaaatctcaaggccggccaaacactccgccttcatgacgatgaatcgaagaccggtacatatgtagtgcggaaaggggatacgcttcatcatatcgccgaaaaaatgggcgtaactgtacagcgcctcaaagaatggaacgatttgaaaggagagcggatttatccccgccagatgcttgagatcagggagaattcctaaaaaaaacggaacctgaaaggaattcttttcaggttccgcagcttctgtttaaggaaggtcgatggctttaacagacacgatatccgggatgtttttcagctcagctaaaatatcgtcctcaaggtggcggtcaaaggaaagcatcatgatcgcttctccgcctttttcttttcggcctacctgcatagtggcgatattgatgtcatggtctcctaaaattcgtccgacatggccgatagcccctggtttatcctggtggtgaatgtagacaaggtgtccagccggataaaaatcaatatcaaagccgtttaaggcaacgatgcgtccgccgaagtgcggaatgtacgtcgctcttaaagagaatgttgttacatctcccgtgacagtcacagagatgcagttttcatagcctgactcattggaagaaattttttcgctgaagctgatgccgcgctctttcgcaacggtgccggcattcacttcgttaacggtagccgcgaccctcggcttcagaaatccggccaaaaggcttttcgtaataaatgacgtttcaagtttggcgatggagccttcatattggatggctacatcttgaacaggctcattcatgcactgagacacaaggtttccgatcgtattggcaaactgatgataaggctggattttttcgaatgaatcctttgtcatggccggaaggttgatcgcggacatcacagggtttccttgcgcatactgaaggacttcttcggacacttgtgcagcgacattcagctgggcttcttttgttgaggcgcccaagtgaggagtcgcgactacaagcggatgatcgatcagttttgaatcgaccggaggctcgacttcgaatacatccaaggcagcgccagcgacatgtccgctttccagagcttccaaaagcgctgcttcatcgatgatgccgcctcttgcacagttaacgagacgaacgccttttttcgtttttgcgatggtttctttgttcaaaagtcccttcgtttctttcgtgagcggggtatgaaccgtaatgatgtcggcgcatgccagaacttcttcaaagctgttcgcgttaacgccgagcttgcttgccctttcttgggtcaggaacgggtcaaatacatgaacggtcataccgaatgcttttgcgcggctcgcgatttggcttccgatgcggcccattccgatgatgccgagcgtttttccgtaaagctctgaaccgacgtaagccgaacgattccactcccttgatttcacggagatgtttgcctgcggaatatgtctcattaacgctgaaaacattgcaaaggtatgttcagcggttgaaattgtattcccgtttggcgcgtttacgacgataacaccgtgttttgtcgcctcgtcaatatcgatattgtcgacgccgacacctgctctggcgacgattttcagcgaagtcatctttttaaacagctcttcggttaccttcgtggcgctccgcaccaagagcgcgtcaaacgtatgaagctcgtcttccgcttccgcaacattcttttctacaatttcaataaaatctgcttccattaatggtttgaggccgtcgctggacattttatctgagaccaatactcgaaacatgtaagatttcctcctaaataagcgtcataaatatctgataatttaccatattccataaagagtgtcaatgagtttcacgcggaaagacgaaaattaaaaatgaaataactgtgaatgtgcggtttttagtgtgcggaaaaagtgagtttaccgaaatatcgtgcaggatgtcccaaaacagcgcaataagctttgcacctgtacattttttcacaattaatttataataatatcagtattaaaaataaataagatcaatcttcggggcagggtgaaattccctaccggcggtgatgagcaaacgctctaagcccgcgagcctttttatgggcaggattcggtgcgattccgaagccgacagtatagtctggatgggagaagatggaggttccgcgcgttttgaaatgaacattttcaaacgtttatttgacctgtctgtaaaacagccccgctttttcaataaagcgggttttttgtttaggacaggggaaagaaccattcctcttttcgtgagatgtgatcgaaaaggagagagtgacaaaatgaaacacaacaaggtgagacgtctcgtctctatcagcatgctgagcagcatcgcatttattttaatgatgctgagctttccgatcctgggggcattcccgtatttaaaaatcgatttcagtgatatcccggcattgctcgctgttattttgtacggtccgggagccgggattgccgttgaagcgatcaaaaacgtgctgaattactttattgcaggaagcgcctcgggcgttccgattgatcaggcggctaacttcattgccggaacattgtttatcctgccggcagctgtactgctgaaaaaatcaagttctgccaaagggtttgtcacagctcttttcgcagggacgcttgtgatggccgtttcgatgagcattttaaattatctgctgtttctgcctgcctacacttggtttttaaatgctccagcgctgactggagaggcgctcaagacaacagttctggccggaatcctgccttttaatttcattaaaggcatcgctgtggccctcgtgtccacgccgattttcctttcgctgaaaccgcggctgaaggaaaacgtccgcatggccaaataaataaacatgacaatatcgggtgcatgttcccggatattgtcagctgcagaagaagccggatgtctttagccggcttctttttgcttgttggtaaagccgtgcttatctcataaaaaaacatccggcactttgtgcaccggatgttttttggctttattcgtgtttaagcgggtcgccttcgaacggctcatccgcaactttgatcgaatctgtaggacagccttcaaacgcgtccatcatgtcttcttctaagacgtcagggacttcgacgacaccctgattgtcgtcaagggtgacaaatgcgattccctcatcgtcgtaatcataaatatcaggagccgcagcaccacaagctccgcatgcgatgcacgtatctttgtctacaattgtatattttggcatgaataaaaaacctcccagattgttcttcgttggaacaaatggtttaaccctctatctatccgatatgaaacctattcccattccttattgtaatggtgttaatcttacatttcaactcaaaaatattgagaatgcttatcacacaagggttctactgctaacataccccttttatatgagtttaaacgtcgatttctccgcaaaatctgttaaaataaaaggaagaaatgatcgaatgttgccggaagattgcaggtgatgatatgccggttcatttttttgacgcgattgtgcttgacattctgtcatccatgaagggtgagcgttctccaagcgcggtctatcatttattaaaaggaaaaaggtcgtcacagacgatacaggacgccggtttatttgccgtttcaaaatacttcggcttttgttcggctctgtcgagagagcaggtggcagccagcgttcaacgattgaagcaggagtctttggtcagagaaaaagcggaaagcggcgcttacaccgtcaccgaaaaaggagaagcggaacttgccggcttttttgccctttatccgtggccccgccattttcacggcggctattatcaggcggcagccaaagtgatgtgggcaaggatgtcgcttttgatccaagtgctctccaacaagctttaccgcgaacgcgtgtatttgccgatcgtaaaagattatcagattcagaactgggttaaacagtatttaagaaaccggaatgctgctgaaacagcggcccagtttcaccaagagctgaaagagaagctgtctgttttaaatcatgatgaacaggccgctatttttgttcactccctgacatccagaacaaaagcgggctatacatttagacagctttccgaaaaaatgaaccttgatgagtggtacatatatgcactgttttgggatgttctgcaccattttattcaatccgcccaaaatggtgaaagtccgctttttcaaacgctcattcatgacattcctttgaatgatggtctgacacaatcgacgagaaaaacgctctttcttataaaagaagggtatacaatagaccggatcgcaaaaattagaaagctgaaattggcgacgatcgaggatcacattgtggaaatcgccattcatgatccgtctttttccatcgatcagtacgtgtcgaaagaggaacagaaaattattgccgattatgcgatagcgaaccaaaccaataaaatcagacaaattaaagagggactcggcggccgatacagttattttaaaatccgcctggccctgtcgaaaacggtgatcaggaatggataaacttcatcaggcgctccgcaggtattttggttatcatgcttttaaaaaaggccaggaaacgatcatcaaaagcgtgctggagggacgggacacggtggcgatgcttccgacaggaggcgggaaatcgctgtgctatcagctcccagggcttttgttagacggcaccgtcctgatcgtctcgccgcttttgtctttaatggaagaccaggtgcagcaattgaagatgcgcggagagaagagagctgccgccttgaacagcgctttgacacaccaagaaaaaaatgacgtattaaaccggcttcaccgcctcaaatatctgtacatttcaccagaagcgcttcagtccggccaaatgctgaaaaagcttcaattgctcaatgtcagcctttttgtcgttgatgaagcccactgcatctcacaatgggggcatgatttcaggcctgattattcgaagcttggagacatcaaggcgctcctcggtcatcccgtcactctggcgcttacagcaacggcaaccgaagcgacattaaaggacatttcggaaatcctggggcttaaagccgccaattatttgattcattcggtcgaccgtccgaacattgcgcttcatattgaaaagctgagggatactgctgagaagacggagcggctgacagggctggttcaaaagctgcaaggtcctggccttgtttattgcccgacgagaaaatgggctgaagaactggctgacaagctccgtaaagaagcaaacttgagaacgggattttatcatggcgggatggaggcaagcgacaggatgctgatccagcagcagtttatccgcaatcagcttgatgtggtctgctgtacaaacgccttcggtatgggagtggacaagccggatatcagatatgtgatccactttagcctcccgcagacgattgaggcgtatctgcaggaaatcggacgtgccggcagggatggaaagcggagcgtcagcattttgctgaaggctccgggagacgaggaaatccaggagcagctgattcaaatggaagccctctcccaaagcgatatcggctttttatacgaaaagcttgcaggagtgaaagatgaacgctgccggcgggaagctctgcagctggccggtttatcggaaacgcaagcccgccattttctccatctttatgagaaggtgcatcatctgggcggcgatggccgggcggtcattcagagggagatggacagccgcaggcagctcaaattgaaaaaagcggcgggattcgccgccgtcaccgaaacagaagggtgtttcagggaaagcttgctcgcttattttaatgaacaaaaaaagccgccgaaaacggatgaaacagcgtgctgcacatcctgcggtttaagtcttgaagcatacgaagtcaaaggagaccgtccgtctatgaacaaattgacagcgtgggaagaagaattggataccatatttgccgccagctgtgatcgtgtatgctgaaaaaacagtcggaaatcatacgtcgcctgtcagacggggaaatgctgaaacagctctatttttcccagacgctgatgctttttaccgcattattgatgggcatctttttatttgatgatgcagacgcttttctatcgctttggaatccatcggacttgagcatcctgaagtacggggcgccgctcgcggctctcgtgatcatcgccgacctgatggtgatgaaatgggctcccaagcatatgtatgacgatgaagggataaatgaaaagctctttcgtgaacgctcgtatccgcatatcgtgattcttacccttttcattgcatttgcagaggaaatattgttcaggggcgttatccagacgcatttcggtctctgggcggcgagcattattttcgcgatattgcattttcgttatttaaaaaaatggctgctgtttgtaatggtggtgtccatcagctttttgctcggattgagctttgaacggacagggaatttatttgttcctgtcacggcacattttttgatcgatgttgtatttgcgtgccagattcgttttcaacacgtaaggaggagttcacatgacggagatgtcaagaatagagaggaagaagagggaacaggagaaggccagcgctgaaatgaaccgggaggcggccgcggctgttgaactggagacacttgatgaggagattccttccagacggacttatcataaaaaaaagaagtccagcaaaaaaaagaataaagacagaaatccactattcacgtctcttgcagtcatgtttgttttcattccgatcatcgtcttcgtggtgttcatgtacatgctgaatcaaggaggcgataccgaccctgatcaatatgataatgtgttttatgaaaacaaaggtgaaacgggaatgacgaatgaaaatcaaaacggtgaacaagaagcggatcaaaaggcggcttcgcagcatacagccgccgcccttcaagaagaaaagctgaaagagagcaaacagccggaaaataaagaggatgaaccgtcaaaaaaagacgagcaaaagcaaaaagagcggcctaaagaggcaaaaaaagcagatgagcagcctgtcgctgcaaagaagcccgccgcatcgaagcagcctgcggaacaagagaagaaaacggcaaacgcgcctcaaacgccgccagttcagcaagcaccgcagcccaaaaaggtgctgaagcacacggttggcgaaaaagagacgcttttccggatttcgatgaaatattataagaaccggtcaggagaggaaaaaatccgcaactacaatcaattatcaggcaacaatgtctacgccggccaggtcctggatatcccgatttattaacagtggcatgattttgcccgcgaatacatatacattgtactaacaaataggacaaggtgtgaggactgtgggaagcgagcttgaagagctggaccgttttacggacgaaccgacgaaacaaatgctccgcgccttaattaaaaggaagaaaaagtacgaaaactatgccagacagacattcaggtggcaggcggtggcggcgatatgcgcggtttcgttttgtgtgtttgcagcgtcaaaggggattgggcaaaacggcttcctttccggcttgctgaatgactccgtctatctgctgtggatcttgtcggccgcttttgcatacagcaccgcttactattttaaaaagaaggaagaaaaagcagaaggggaatatcataagctgagatgcgagattattcagaaaagcacggatctatggccccagcctgaagagtggaaatcaagggaaacggtttttaagatcatgaaacagcagtatgacattaatctttatttcgaaagcaaataaaagacgttttcttgttaaaagaaacgtctttttgcatcaagccgtcttatcataaacaaaacagattggagaatgcacatgatctattggctcagtctggcttcggccgctttcatcggccttgctgctttagtgtggaaaatgtcagccatcgcgcgcgaaaaccgggtgttgaaggctgaattttcactcgggcgcctgaaaaaggaattgaatgtcttttttatttcagatattcataggcggacagtcagcgaagacattatttgtgaagtgaaagaacgcggggttcagctcgtcatcatcggcggcgacttagcagagggcggcgtcccttatacgagaattgaagaaaatatcaaaaggctttcaagtttgggaaaaacgtattttgtatggggaaataacgattatgaagttgatcaggaaaggctgctggaaatattcaagacatacggtgtaacgcctttgcgcaatgcttcggtattgcatgaccatcaaggacaaactgtcaatatttgcggagtggatgacatcagactcgaattggatgattacccggcagctctcggcggcgtgcagccgggttttccgactgtccttgtgtcacataatccggagattcatcatcaaatacaggaggcggacggtattgacctgatattgagcggtcatacccacggaggacagattcgcttcggcagattcgggctctgtgaaattggaggaaccggcactgttttcaaggctccgtacttgatcagcaacggctatggaacgtcgaagcttcctctgcggctcggagcgaggccggaaacccatctgatcaagctggttccgggcccccgtatggaaggaaactgatgctttttcactgaaaaaaaacgaaaaggcggcattgtgcttgtcttcctctcaaacacagtgtaaactggtatcaaaattaagaacctatgactcatcatctccatataataagatatatgatgtgtgcaagaagaggcaggagggaacgttatgcggcttgagcgtctaaattataataagatcaaaatctttctgacacttgacgatctgacagaccgggggctgacgaaagaagacctttggaaagactcatttaaagttcagcagctgtttaaggacatgatgaacgaagcgaatacagagctcgggttcgaagcgaatggcccaatcgctgttgaagtgtattctcttcaagcacaaggaatggtcatcattgtcacaaaaaatcaggaaacagatgaagacgataatgagtatgatgaggactatattgaaatgcaagtcaaacttggcgaaagtgttgacattatatatgaatttcaaacgtttgagcatctgattgaactttccaaaaatctggaccgcatcggtattcaaggcgggacagtctaccactatgagggcaggtatttcttaagtctcgacgattttgactcccttgaggttgacggcgtgatttcgattttagccgaatatgggaatccgacgactttaacgatttacaggcttcaggaatacggaaagaaaatcatggagaacaatgccgttcagaccattcagacatactttaaatagcgcgcattcaaaaaagatattctgctgtgttaaacagcagtttttttctgccgaaaataagaatataacaaaaatgatttttcttgaatattttcacgaaaaatggttgattgttctttgcatgattagtgcaagggtgtatactattctctgaaaggacaacatgccagaaagactttaggaggttaacttataatggtagccgatcaaaacaccggtcatactgaagaaaacacacatgacgttttgaaatcaacgcaaacggtgatacataaggcgcttgaaaaattgggatatcctgaagaggtgtatgaattactaaaagaaccgattcgttttttaacggtgaaaattccggttcgcatggacgatggatctgttaagattttcacgggctaccgagcccagcacaatgatgcagtagggccgacaaaaggcggcatccgttttcatccgggagttacagaaaaagaagttaaagcgctttctatttggatgagtctgaaatgcggcatcatcgaccttccatatggaggcggaaagggcgggatcatctgtgatccgcgggatatgtcctttcctgaactggaacgtttaagcagagggtacgttcgggcgatcagccaaattgtcggaccgacaaaagacgtaccggctcccgatgtatttaccaattctcaaatcatggcatggatgatggacgaatattcaagaatcgacgaattcaactcgccgggcttcattaccggcaaaccgctcgttttaggtggttctcacggcagagaatctgcgacagcaaaaggggttacaatctgcattaaagaggcggcgaaaaagaaaaacatcgacattgagggagcttctgtcgtcgtgcaggggttcggaaatgcgggaagctaccttgcgaaattcatgtatgacgcaggtgcaaaggttgtcggcatttctgatgcatacggcggcctgtacgatcctgaagggcttgacatcgattacctgcttgaccgccgagacagcttcggaacggtcacaaagctgtttaatgacaccattacaaacaaagaactgctggagctggagtgcgacattcttgtgccggctgccatagaaaatcaaattaccgcggaaaacgcccataacatcaaggcgaaaatcgttgtcgaagctgccaacggcccgacgacgctcgaagcgacgaaaattctttccgaccgcgacattcttcttgtaccggacgtgctggcaagcgccggcggtgtaacggtatcctattttgagtgggtgcaaaacaaccagggattctactggactgaagaagaagttgaagaacgtttggaaaaaatgatggtcaaatcgttcaacaacatttacgaaatggcgcacaaccgcagaattgacatgaggcttgcagcctatatggtgggcgtccgcaagatggcggaagcatcccgcttcagaggctggatataggctcaaacatttgcagcaacccaaaaaatctcctatcataaaataggagattttttgatttgccggatatgacaggagatgaacggaacatgaaagaagaaaaagtgatcattatcggcggcggcccctgcgggctttcagcagctattcacatgcaagagatcggaatagatgcactcgtcattgagaaaggaaacatcgtcaacagcatttatcaatatcctactcaccaaacctttttcagctcaagcgaaaaactggagattggcgatgtggcttttattactgaaaatcacaagccggtcagaaatcaggcgctttcttattacagggaagtcgccaaacgaaaaaatctgcggatcaacgcgtttgagaaagttcaatccgtaacaaaaacagagaataaccaatttatcgtggaaacatcaaaggacacgtatttgtcttctttttgcattgtcgcaacgggatattatgacaatccgaactatatgaatgtaccgggagaagaccttccaaaagtatttcattattttaaagaggctcatccgtactttgataaagatgttgcagttatcgggggcaaaaactcaagcgtcgacgcggcaatggagctcgttaaggcgggcgcaagagtgaccgtattgtacagagggaacgaatattcctccagcatcaaaccgtggatccttccggaattcctttcgcttgtcaagcacggaaaaatcagaatggaattccgggcggtcgtcaaagaaattacggaagacgagctgattttttctgtcgacggaaaagaaaccaggatcaaaaatgattttgtatttgccatgaccggctatcatccagatcatagctttcttcaaaaaatgggagtcaaaatcgacgcagagtcgggccgtcctttctttaatgaagaaacgatggagacgaacgaagaaggcatctttatcgccggcgttattgcggccgggaacaacgcaaatgaaatctttattgaaaacggccgttttcacggcggcttaatcgcagctgaaattgctaaacggatataaaaaccggatgttttatgatttgtatcaggcaaaagagagcatattctatatatagatgtgctctcttttttatcggcacacagatcaacgcgaaaaggggcatcttgacatgaataaaaaagtagctctcattacaacgggaggaacgatcgccagccggaaaaccgaaagcggccggcttgcggcaggggcgatcagcggccctgaattagccgaaatgtgcagcctgccggaagatgtacagatcgatgtctacccggcgtttcagcttccaagtatgcatataacatttcagcatttattagagctcaagcaaaccatcgaacgcgtgtttcaggacggcggctatgacggcgcggttgtaacgcatggtacggacacgcttgaagaaaccgcctattttttggatttaacaatagaggatgagaggccggtcgttgtcacaggttcacagcgagcaccggaacagcaaggcacagatgcatatacaaatatcaggcatgccgtatatacagcttgcagtccggatataaaaggagccggcacggttgttgtttttaacgaaaggatctttaacgcgcgctacgttaaaaaagtgcacgcttcgaatctgcagggttttgacgtattcggtttcggctacttagggatcattgataacgacaaagtatacgtttatcaaaagccgttaaagcgggatgttcaccagctgcaaaggccgcttcctgcagtggacatcgtcaaatgctatcttgatggagacggcaagtttatcagagccgccgtccgcgagggtgtcgaagggatcgtccttgagggagtcggaagggggcaggtgccgccgaatatgatggctgatatcgaacaagctttaaatcagggcgtttatatcgtcatcacgacgagcgcagaggaaggcgaagtttatacgacctatgactatgcaggcagcagctatgacctcgcgaaaaaaggggtcattttaggcaaggattatgacagcaaaaaagcgagaatgaaactcgccgtccttcttgcaagctataaagaaggcataaaagacaaattctgctattaggcggcctgttctttttcaatttcaaaacaatccgaatcatggtaggatagaatgagatgaaaaggaaagaggtttcctcatgttcggaattatctcagcaggcctagctcccggaatcgcactgttaatgtatttttacttaaaggaaaaatatgaatccgagcccattcatatggtcatccgcctctttatactgggggttttgctcgtttttccgacgatgttcatccagtatgtattggaaaaagaacacatttctgagggcagttttgtcgtttcgtttttaacttccggctttttggaagaatttttaaaatggtttttgctgatggtcagcacctttcagcatatcgactttgatgaacactatgacggaatcgtatacgggacaagcctttcattggggtttgcgacgcttgaaaatatattgtacctcatcggaaacggggtggagtacgcctttatgcgcgctttgcttccggtttccagccatgctttattcggagtgatcatgggcttttacatcggcaaagcccgtttttcggatagcaaaacaaagatgaaatggctgctatgctcgctttttattccggctttgcttcacggtctatacgattatattctgctcgccttaaaaaactggatctattttatgctgccctttatggcgtttctttggtggttcggcttgcgcaaagcaaaaaaagcccgttccgtcaaaaccggcgggcagcctcttcagcaatagccgccttgtaaaagggcggtttttttatttttcttgtcaggcatatttgcctaaagatgaaacagaaaggaaagcgtgtataaaatctgcctcgctacaaaagatatggttacaaaaatgctggaggaggcttaaaacatgaagtcgaaaggttctttttgtttgaatgtcattttatgtaccattatggcaaccagtctttcacttccattcagtcaaaaaagcgctgccttttctgaacaggtaatacagcggggggcgacaggggatgatgtgattgaactgcaggcaagacttcaatacaatggctattacaatggcagaattgacggagtatacgggtgggcgacatactgggccgtccgcaatttccaaaatcagttcggcttaagggatacagacggcctggtcgggccgaaaacaaaacgattattaatcaatcatactaaatattacagcgactacgtgcacagacagcttcgaaaaggaaaccaatttacacattacggcgggctgccgctgaagtatcagacgaagccttcaaaagaagtgcagcagcaggcgagaaaaaaggcggaagcaagacagcggcagggcgcacaacagcagggtaccgcccaaaaacagccgcagcaaaagcagcaggccgctcctgcacagccgaaaaaacaagcacagccaaaggctgcacctaaacaagccgcgcctaaaaaacaggatgccgttgcagccaatatgccgggcggattctcgaacaacgacattaatctgttggcccaagcggtttacggtgaagcgcgcggagaaccgtatgacggccaggttgccgttgcagctgttatattaaacaggctcgatagccctacgttcccgaatacggtggcgggcgttatctttgaaccgcttgcatttacagctgtcgcggacggacagatttatatgacgccggatgaaacggcgaaaaaagccgttcttgacgccatcaacggctgggatccatcagaaaatgccacttactattttaaccctgacacggccactagctcatggatttggggcagacctcaaattaaaaggatcggtaaacacattttctgtgaataaaagcgaggtgctataaatgatcagaggaattttaatcgcccttttaggtgtcgccatcgtcggaacaagctattggggctataaagaacatcaggagaaagacgccgttttgcttcatgccgaaaacaactatcaaagggcatttcacgacttaacttatcaggtggatcagctgcatgataaaatcgggagcacgcttgcgatgaacagcaaaaaaacgctgtctcccgctttggcggaagtctggaaaacgacttctgaagcgcataacaatgtcagccagctgccgctgaccttaatgccgtttaacaagaccgaagagtttttggcaaaggtcggagatttcagctacaaagcagccgtgcgcgatcttgacaaagagccgctcaataaaaaagagtacgcttctttaaatcagctatatgaaaattcaaaggatatacaaaatgaactgcgtaatgtccagcatttgattattgacaaaaatttgagatggatggatgtagaacttgcgctcgcgtccggccaaaaacaaagcgacaataagattattaatggctttaaaaccgttgaaaaaagcgcaagtgcattttcggatacggatttaggcgcgacagagatgacgaacacgaaaaaagagcagcaagggtacgaccatttacaaggcaaaagaataaccgaaaaagaagcgcgcaagattgcccaaaaattcgcccaggacaaaaattacaatatcaaagtatcgaaaagcggcaagaaaacgaacagggatgtatacagcatcagtatgcaggaccctgatcaaaaagcggatatttatatggacattaccgaaaaaggcggatatccggtttatctgattcaaaacaaaaaaattaaagatgaaaaaatcagcttaaacgatgcgtcaaacaaagcccttcaatttttgaaaaaaaacggctataaaacggaagacctgaagatggatgaaagctcgcaatacgacggcgtcggggtgttttcatttgttccggtccaggacgatgtctggctctatccggacagcatccgcatcaaggtcgcacttgacgacggcgagattaccgggtttaatgcaaaggatttcttaatctcccataaaaaaagagacttgccgaagcccaaactaacgcctgaaaaagcgaaagcaagcctgaatcccaacgtaaaagttcaggagacgcgccttgctttagtcacgaacgagctttcgcaagaagtgctctgctacgaaattctcggcacgattgaaaacgatacattccgcatgttcatcaatgccaatgacggcacggaagagaaggttcagaaaatgaaaagcgcagaaccgatatacaacgacttgtaaaaacgatagatcaaagggaaaaggcgataacatgccttttcctttttagcattcggaataattcgccctaaacatttccatactgaacatatgggcggaacgtccgccggtaaattgaaaatgcccggggccataaattttccgggcagcggaggaataatatgaaaacaatcgaacggttattatttaagatactcgtcgtacagacggtcattttaatcagcgtgcagcttctttttcatttctccaaggctgagccttatctgtcaaaggtcgtgcagtatgaaggcgtgaacaacatgaaaatcggcgaatggatcgagacatttaagccgtaattcacgctaaaatctcccctttttcgcctaatacatgatacaatcctataaggagtaccagatagcaaggagaggaattatggaaaagaaattatgcattgcaatagacggccctgcggcagccggaaaaagcaccgtggcgaaaatcgtggccagaaaaaagtcgtatatttatattgatacgggtgccatgtacagggcgattacgtatctagcgctggaaaagggcgttgatttaaacgacgaagcggcgctgacggccttgttaaaagaatctgccatcgatctcacggtttcgcctgaaggagagcagaaggtttatatcgcaggcgaagatgtaacagaggcgatccgcacggatagcgtgagcaaccaagtctccatcgtcgccaaatacgccgggatccgcgaagaaatgacgaaaaggcagcagcagctggctgaaaaaggcggagtcgtcatggacggccgcgacatcggaacccacgttctcccgaatgcggaagtgaaaatatttctcttggcgtccgtcgaggagcgggcaaaacgccgctttgaagaaaacgtcaaaaaagggtacaatgtaaattatgaaacgcttgcagaagaaatcaggcgccgtgacaaactcgattcagagcgcgagatttccccgttgaaaaaagcggacgatgcgcttgaaatcgacacgacttcattgacgatcgatgaagtggccgaaaaaattctgcagattgtagacaaaaaggctcaaaaataaaaaatccgggcaaattacttattgtctgcatgttttgacttgacaaacacaggcttttattagaagttagtaataataaatcatgttttagaacattcaaatatccatttttgaatggttctttaatacatatcggctgtccggagcggatatcatttcgtccggaataaccgtttttacaaaagctgtgtaggtttggaccaaggaggttattgaaatgacagaggaaatgaatcaaattgatgttcaagtaccagaggttggagatgtggtgaaaggtattgtaacgaaagttgaggacaagcatgtcgatgttgacatccccaactgcaagcaaaccggaattatcccaatcagtgaattatcaagtcttcatgttgaaaaagcatcagatgtcgtcaatgttgacgatgagcttgaattaaaagtgacaaaagtggaagacgatgcattgattttatcaaaacgtgctgttgatgcagaccgcgcttgggaagacctagagaaaaagtttgagtcaaaagaagtgtttgaagccgaagtaaaagacgtcgttaaaggcggtctggtcgtcgatatcggcgtgcgcggattcattcccgcatcgcttgtagaggcgcattttgtcgaagattttacagattataaaggaaagacgcttactttaatcgtcgttgaacttgacagagataaaaaccgcgtgattttatcacaccgtgcggttgtagaaaaagagcagtcagaaagaaaacaagaatttcttcaaacgctggaagcaggacaggtgcttgaaggaaaagtacagcgcctgacagacttcggtgctttcgttgacatcggcggcattgacggtcttgttcacatctcccagctctcgcattcacacgttgaaaaaccgtcggacgtcgtcgaagaaggccaggatgtcaaagtcaaagtgctgtccgtcgaccgcgacaatgaacgaatttcgctatcgatcaaagaaacgcttcctggaccttggtccaacatcggtgaaaaggtgaagcctggagacgtattggacggaaaagttcagcgcttggtgagcttcggtgcatttgtcgaagtgcttcctggagttgaaggcctcgtccacatttcgcaaatctccaacaaacacatcggaacgcctcatgaagtgcttgaggaaggccaggacgtaaaagtgaaagtgcttgatgtcaatgaagaggaagagcgcatttctttaagcatgaaagagcttgaagaaaacaccgataaagcagagcaggaagattaccgtcagtaccaggcgaaggaagagtcttcagggttccagctcggtgaaatgatcggagacaaactgaataaattaaagtaaaatttggtgatgatggtgacgcgagcaaaaagaaaaaaagaacacattgatcatgccctgtccaccggacagaaacgtcagaccgggcttgatgatatcacatttgttcacgtcagccttccggaaacggaattgtcacaagttgatacttcaaccaaaataggcgaactgtttttaagttcgcctatttttatcaatgcgatgacaggcggaggcgggaaggcgacgtttgagatcaacagggctttggcgagggcggctgcacaaacaggcataccggtcgctgtcggctcgcaaatgtccgctttgaaagatcccgatgagcgaccttcatacgagatcgtcagaaaagaaaatatgaaggggcttgtattcgccaatttggggagcgaagcgacagtggaacaggccaagcgggcggtcgacatgattgaagccgatatgcttcaaattcacctcaatgtgattcaggaaatcgtcatgcctgaaggcgaccgcaattttacaggacgcctgcgccggattgaagacatctgccggagtgtcagcgtaccagtcgccgtaaaagaggttggctttgggatgagcagggataccgcggcccggctttttaacgtcggcgttcaggcgatcgatgtcggcggattcgggggaacgaatttttcgaaaatcgaaaatttgcgcagggataaagcagttgagtttttcgatcaatggggcatatcgacagcagccagcctggccgaagtcagctcgatatccggcgatcggccgattatcgcatccggcggcatacaagatgcccttgatttggccaaatcgatagcgctgggcgcgtctgcggctgggatggcaggctattttctcaaggtgctgacagcttcgggagaagaggcgttagccgccgaaatcgagagcctgatagaagatttcaaaagaattatgaccgtcttgggttgcaggacgattgaacagttgaaaaaagcgccgctcgtcatcaagggcgatacatatcattggctgaaagcgaggggtgttgacccctttgtttacagcatgcgttaaaaaaaccggcttctcttgagccggtttttttacgggtttcgcttgcgcgcgtcctccgcactttcgagagaggcggcgccattgtagctgatcgactggtcacggtccgattcggttcgcttctgctgtttcagcttcttttcctgtctgtcttttcccaacgctgttccctccttatcgcacgtttaaaaaatcttaagtcgctccatactgaaaatggaggacgaaaacatatggaagaattctattattattggtcaatgtggtttttatgggtgctgacgacttttatcctcgagaaaaacaggtttcgcttttatgcgtcagcatttattttgctcaacatcattttaagtatgtatcaggtcaggctctttatgtattttaatgccgcctatttgtcgttttatatcggagccttcatgctgtgcggttttttgaggcttcataaaagtaacaagcggctgctgcttcatctctcgatggtgtccgcctacggttttttgtttctgtttgcattatatgaccctgtttggtttatcctaaagcctgaatggctgatcatcatcttgtttgtcatcatgacagcagcttttgaaagaagcttcgccgtccgtctcggggtgtttgtgctcgggatgtgccagggggagctcttgtatacattcgtcatcagaaagctctatggagacattgcagcgggcggttattcatggctgtcaatgtgcgctgcggggatcgttctcgtttacggaatatcccagtatgaacagctgatgcatcaagtctattataaattgaagcgattgaataaaggagcagcaaaaatgtcatgagccaatatacttatccgatcatcttgggaattgtcgcaggtattgttgtcagagtatatatgctccgaaccgactaccgccagtaccccacttatcttcatgggaaaacgatacatattgcgctggctttgatcgctgccagcattggcgcgatcattattccgtcaatcttgaaatcggattatacagcgattacgtttttaacgctggctgcaacccaattcagggatgtccggaacatggaacgggaaacattgacgcagcttgacggctatgaactcgtttcaagaggcagcacgtatatcgaaggaatcgcgatcgcctttgaaagcaggaattacattgtcatttttacatcgctcctgacgaccctcgcatacattctgttttcatcggtatgggcaggccttgctgctgctttgatctgttttatcgcgggcagaatcttaatgtccggaagctttattaaggatatcgccgatatagagtataaaaagcctcattttgaaggggccggactttatgtcgacaatatttacattatgaatatcgggcttcccgaaaagcggaagctgattttggaacacggcatggggtttattttgaagccgaaaaattttaattccgcagtaacgattgccaatctcgggcaaagacaagcgattttatttgacgtttcaaatgtgctcggcgtgtatcgagattctggagaaccctctctttcgccgcttgcgaaaagggatttgaatgacgggcgggtcgcggtttttgtccttccggtcatcaaggacaaagagacggcgatcagggtcatcggcgatgttccgacgctggaaaacgccatccgcgtaccgatggaattcattaaagaaaagcacagcaaggtgataaaatgagcgaatcaatcgaaaaattcattctcgccgtcgtcacaacgaggcgagacagagtgatcggcgggacggctgcatttttctgcgacacccccgaggaaatgaacacgtacgccaaaaaccttgaagccattctcgacggaatcgcccacggaataggagatgacctttatttgattgtgaaacatttttaattacagttgtgatctctttagaaattgatataatatatgagttaagcccttctgtatggaataagaagggtttctttcttcaaactgattttttgaaaagagaaacaaatgatcattcatttaaagatggaaaagctttactgaattgaaaggaagggtactatgggaaaacctgtcgtagccatagttggaagacccaatgtggggaagtccacgatctttaacaggatcgcgggcgaaagaatttcgattgtggaagatacacctggcgtgacgcgggatcggatatacagctctgccgagtggctgaatcacgacttcaacctgattgatacaggcggaatcgaagtcggcgatgagccgtttttggcgcagattcgccatcaggccgagatcgccatggaagaagcagatgtgattattttcatgacgaacggccgcgaaggcgtcacagccgctgatgaagaagtggcaaaaattttataccgtacaaaaaaacccgtcgttctggcggttaataaagtggataatcctgaaatgagagcaaacatttacgatttttatgccctcggctttggcgagccgttcccgatttcagggacgcacggccttggtctcggcgatctgcttgacgcggtcagcgaacattttaaaaacatacccgagacgaagtatgaggatgaagtcgttcaattttgcctcatcggccggccgaacgtcggaaaatcctcccttgtaaacgccatgattggagaagagcgcgttatcgtcagcaatattgcgggaacgacgcgcgacgccattgacacgaggtttacatacaatcaaagagactttgtcatcgtggatacagccgggatgagaaaaaaggggaaagtgtatgaggcaactgaaaaatacagcgtcctccgagctttaaaggcgatcgaccgttcagaagtcgtctgcgtcgtcttggacggcgaagaaggcattattgagcaggacaagcggattgccggctatgcgcatgaagcaggaaaagctgttgtcatcgtcgtaaacaaatgggatgcagtcgaaaaagacgagcggacgatgaaagaatttgaagaaaaggttagagaccactttcaatttttggactacgcgcctgttttgtttatgtccgctttgactaaaaagcgcatccatacgctgatgcctgcggtcatgacggcgagcgaaaaccattcgatgagggtgcagaccaatattcttaatgatatcattatggatgcggtggctatgaacccgacgccgacgcataatggaaaccggttaaaaatttattatgcgacacaagtggctgtgaagccgccgacatttgtcgtatttgtcaatgaccctgagctgatgcatttttcttacgaacgctttttggaaaaccggatacgcgacgccttcggatttgaaggaacaccaatcaggattttcgcaagagcaagaaaataaagaggtgtagtaaaaatgacaaaagtatcgattttgggagccggaagctggggaacagccttggcgctcgttttggcggacaaccagtacgatgtgtgcatatggggccatcgtgaagaactgattcagcaaatcaatgaacatcatgaaaacaaagattatctgccgggtgtcaaactttctgaaaacgtgcgtgccacaacagatcttgaagctgcagtggctgatgtcaagacgatcattgtcgccgttccgacaaaagcgatccgcgaagttttggcacaggctgtttccttcatcaaccaaaaggcgatttttgtacatgtttcaaaaggaattgagcctgacacactgcttcgaatttctgaaatgatgaaagaagaaattccggctgaattaagggaggacatcgtcgttctgtccggaccgagccatgcggaagaagtcggtttaaggcatccgacgacagtaacggtatctgccgacagcagcattgaatcggcccaggcgatccaggatatgtttatgaaccagaatttccgcgtgtatacgaatccggatatgatcggcgtagagatcggcggcgcgctgaaaaacgtcattgcgcttgccgcgggcattacagacggtttgggatacggagataatgcgaaagccgcgctgattacaaggggcttggcagaaatcgcccggctcggcacaaaaatgggcggaaatccgctgacattctcgggtcttactggaatcggggacttgatcgtcacctgcacaagcgtccattcacgaaattggcgagccggtaatatgctgggtaaaggcttcaagctggatgaagttctggaagaaatggggatggtcgtcgagggggtccgcacgacaaaagccgcttatcagctttcaaagaaatttgatgtaaaaatgccgatcaccgaagcactgcacaaagtattgtttgacggcgaaaaagttgagacggcagtcgaatcattgatggcaagagtcaaaacacacgagatggaagatcttgtgaacacattcgaaaatcaaatgaaatgaccgccccatcatcaactgcttttatactctcctctaagttcgttttaaaaaaaccaaaacattttggagacttaggcaagagaggatacatttgtccgaagacttgcataaaatagaatcgaagtctggaagagctgtatcttacaaattgggttatatagtcacaatcattatgcctgaagcaaagcccccctctttgcttcaggcttttttttgcggctttttccgtttcgaaatattggaaaagctgttgaacttctggtttttcttatataaaatgaaatataacgcttacatcacaagaaaaggtagaaggagggcttcaatgtgaatgtcggtctgttaaaaatgtggtttgccttgggatcaatgggcctgatgttcttagcggtgattgccatatacataagcagatataaatttaaaaaccgttttttaaaaattatcacgtcgtttgtcgcctacacatgtatgctcatctccggcgtgatcgtcttttttgtcgtcttcagcggccccgtcaacgaataatgcataaaaaaggaagattcatatgaaaatcgtaaacgttctgctcgctattttattgaccgcaatcatgttaagcggttgtttgtaccctgaagaaagaaaggcgaaaaacagcgcaccgcatcagcaccagctcaaagaagtgcaggcggccgttgatgaattcagggaggcgacgggagggcttctgccgattaagacaagggatatgggcgtgccaatctatcaaaaataccctatcgattttaacaggctgtccccccggtatatggctgagccgccgggcacatcctatgaaaacggcggagagtacttgtacgttcttgtcgatgtggaaaaaaagccgacggtcaagctcattgatgtaaaaatgtcggaaatgatcagggagttaaagcttcgggtcgaaatgtataaagatcagcacaagtatccgccgtataaaaaagtcgtatccaagaacttattcatgcttgaccatgaaaagctcggactgaaagaggcgccttctgtcacgagtccgctttcgggcacctcgctgccgcttctcgtcgatgaaaaaggcgacattaaagtggattaccggatggatttggccaagctgatgaagaagtcgaaaaaaacggtaaagccgggcgaggaagtccaagatttgatgtgggaagagacgcctttcgttccggcgttttcggtaaagtacacagtgaatgacaaacaggaacctgtttttctcgaatagaatatcggtcaaaatgcaagtatcagtcatgaacctttctcctcggcatacaatgaggagaaaggttttttcatgtatgccgaaaaaatttccctaagctgtcatattgaaataggacaacgtcatacactatagtgtcctgtttttgattgatgaagaagtaaaaaattgaaaaggattggaagtccgggaggggatcacttggaaaaggtcgatattttcaaggatatcgctgaacgaacaggaggcgatatatacttaggtgtcgtaggagctgtacgtacaggaaaatctacgtttatcaaaaaatttatggagctagtggtgctcccgaatatcaacaatgaagcagaccgggcgcgcgcacaagatgagctcccccaaagtgccgctggcaaaaccattatgacaactgaaccgaagtttgttccgaatcaggcaatgtcagttcatgtcagtgacggactcgatgtgaatataaggcttgtcgactgcgtcggctatactgtacccggggcaaagggatacgaggatgaaaacgggccgagaatgatcaatactccttggtatgaagagccgattccgtttcacgaagctgccgaaatcggcacgagaaaagtcatccaagagcactccacaatcggtgttgtgattacgactgacggcacgattggagaaatcgccagacaggattatgtcgaggctgaagaacgggtgatcgacgagttgaaagaggttggaaaaccgtttatcatggtcatcaattccgtaaggccgtatcatccggaaacagaagcgctcaggcaagaattgatggaaaagtacgacattccggtgctggcgatgagcgttgaaagcatgagggaagcggacgttctgagcgttctcagagaagcgctttacgaattccctgtgctcgaagtcaacgtcaatcttccaagctgggtgatggtattaaaagagaatcattggctcagggaaaactatcaagattccgttaaagaaaccgtcaaagatattaaaagactgagagatgtcgaccgcgtcgtcggacacttcagcgaatttgatttcatcgagcgcgcaagcctcgccggaattgaaatgggccaggggatcgcggaaatcgatttatacgcgccggattacctgtacgatgaaattttgagggaagtcgtcggcgttgaaatcagaggaaaagatcacctccttcagctcatgcaggattttgcccatgccaagaccgaatatgatcaagtctcagatgcattgaaaatggtgaaacaaaccggctatggaatcgcagctcccgcattaaccgatatgagcctggatgaaccggaaatcatcaggcagggttcaagattcggagtccggctgaaggcggtggcgccgtcgattcatatgatcaaagtcgatgtggaaagcgagtttgcgccgatcatcggaacagagaagcagagcgaagagcttgtccgctatttaatgcaggactttgaggacgatccgctgtcaatctggaattccgacatattcggaagaagcttgagctcgatcgtcagagaagggattcaggcgaagctgtcactcatgcctgaaaatgcgagatataagctgaaggagacgctggagcgcattatcaatgaaggctcaggcggcttgattgcgatcatcttataaaagggaaggcctcttatcatacgggaggtctttttttatgcctgaaaacaggctgaacgggcgcggtgaaagggggttggacggcaagggcttgcggctggaaatataggaaagattatgattaaaaaagaaaaaacaggaatatttgttcgttttattctgcttaaaccttgacgaataagggatcatcgctttaaaatgcttgatatggctattcagatgtgttaatctacaaacagaaaatcttcactttactggacaaacgttcctctcaaagtgaaattttcgctggaagccgtgaaatgccttttctatatttatttgaaatttctgttcaaacaggtatagaaacaggttgaactgtgaagaaatgatgataatctattgattgataccttttgggaggaggtgaaaggcatgaacaagacagaactaatcaatgcggttgcagaagcaagcgaactatctaaaaaagacgctactaaagcagttgattctgtttttgatacaattttagatgcacttaaaaacggtgaaaaaattcaattgatcggttttggtaactttgaggttcgtgagcgctcagctcgtaaaggacgcaatcctcaaacaggtgaagaaatcgaaatccctgcaagcaaagtacctgctttcaaaccaggtaaagcgcttaaagacgctgtagcaggaaaataattgtatgtatatgccgttttcgcgcgtaatacataccatgttgtttcttcacaggaaagccccttttcaaaggggcttttcataatttaaaggccttttttagacggataacattttgccggcaaaaaacctttcattttgcttttataagctgaagtgtgctagaatctgaattaaatgtatgcgtttctggaggatataaaacaatgagagaaatcaacaaagaccaaattgaacaagccgtccggcaaatattggaggcgatcggagaagatccgaaccgcgagggccttcttgatacaccgaaaagagtcgcaaagatgtacgctgaagtatttgcgggtttaaacgaagatccgaaagagcatttcaaaacgattttcggcgaggatcacgaagagcttgttcttgttaaagatattcctttttattcaatgtgtgagcaccatttagttcctttctacgggaaagcccatgtagcctatatccctaaaggcggaaaagtgacaggactcagcaagttggcgagagccgttgaagcggtggcaaaacgtccgcagcttcaggagcggattacgtcaacaattgccgacagcattgttgaaacgctgactccgcacggtgtaatggtggttgttgaagccgagcatatgtgcatgacgatgcgcggcgtgaaaaagccgggttcaaaaactgtcacttcagctgtaaggggaacgtttagacaggatgtggctgctcgctctgaggtgttggagcttatcaaaacatcatgattaaaaatgagaaggtgtgcgatgaacatgaccaataatcaatcgaatgattttgtcgttatcaaagccgttgaagacggcgtcaatgtgatcggactgacaagggggacggacacgagatttcatcattcagaaaagcttgataaaggagaagtgatgatctgccagtttaccgagcatacctccgcgatcaaggtccggggcgaggcccttattcagacggcaaacggcgagatgaagagcgaatcgaaaaaatagcaggctggctttttatgcccgtccgcgtggcataagacaatatctttcaacatattatggtataattaaactttctccgctcaaaaaagatacataatcaatcaaaagaaaaactgcgaattttgggacaagggtgatatctttgcaagacatctacggacaattatcttatttgaaaatcaagctgaatcaaaagctttcacatccatatttggcgaagcatctgactgcgccgaaagttgatgaggataagctgtttcttttctacgctctgtttgaggaaacggatttaaaagaagctgacaaggaaagttacatcttaacggcgatgcttgttcaaacagcccttgatacccatgatgaagtcacgaccgcagcttcaattaaacaggacgattataaaaaccgccagctgaccgtattggccggtgattacttcagcggcatgtactactcgctgttatcgggtatgaaggatatttatatgattcggacgctcgctgcggccatcaaagaaataaacgaacacaaaatcaggctttacgaccattccgcaaaagatgcagacagcctgaaaaaaagcgtcagcatagtggaagctgcactttttcaccatctcgccgaccacttttacctgcctcactggaaaacagccgccaatgactttcttgtctttaaaaggtttgcggccgaagaaaaagcttcagattcccggctgctggagacgatcatacagaaagagtttccggaaggacaggcttcatgcggacagctggctgctgcggcttataaagaagccaagcttgcgatcaaccagtcgcttgccaaaaagcccgccgtccaaaaatggcttctgaaacgcctgcaggaaattcggcctgaaaaacgaacttatcatcagaaagtggaagaagggtaatcatggtgcagtcaaaagaacagcgcgtacatggcgtgtttgaaaagatttataaaaattatgaccagatgaactccgtcatcagctttaaacagcataaaaaatggcgcgacaaaacgatgcagctcatgaacgttccaaaaggagccacagcgcttgacgtctgctgcgggacgggagactggacgatcgcgctcgctgatgcggcaggagagacaggggaaatcaagggccttgatttcagcaaaaacatgctgagcatcgccgaacaaaaaacggaaagctacagccagatcgaattgatccacggcaatgcgatggaactgcccttcccggataatacattcgactatgtcaccatcggcttcgggcttcgcaatgttcccgactatttaaccgtattaaaagagatggcgcgcgtggtaaaacccggcggccaggttgtatgccttgagacgtcccagcctgaaatgttcgggttcaaacagctatacttcctgtacttccgcttcattatgcctatgtttggaaagctctttgccaaaagcttcaaggagtattcatggcttcaggaatcggccagggaatttcctggtatgaaagagcttgccgcgttgtttgaagaggctggattaaaaaatgttcaatatcatccgttcacaggcggcgtagcggcaacacatgtcggctggaagcgatgatgactacagaaatactcgggtgaatcgatatgaaattgacaacgttttattcttttttgaatgacgatattgaattaatagaaaaagagcttgaaaagaccgtgcactccgactatccattgctcagtgaagcgagcctgcatttgctgcaggccggaggcaagaggattcgtcccgtgtttgtcctgctttccggcatgttcggcgaatacgacatcagcaaaattaaaaatgttgccgtttcgttggaattgatacatatggcttcgctcgtacacgacgatgtcatcgatgatgcggagctgagaagaggacagccgacaatcaaagcgaagtgggataaccggattgcaatgtatacaggtgattatttgttcgctcgctcacttgaagcgatgacaaaaataaacgaaccgaaagcccatgaaatcttgtccaaggcgattgtcgaagtctgtcttggagaaattgaacaaattaaagataaatataatatggagcaaaatctcagaacctatttgagaagaatcaggcgcaagacagcacttctaatcgcgtcgagctgccagcttggagccattgctgctggtgcgggtgaaaacattcataaaacgttgtactggtttggctattatgtcggcatgtcctatcaaattattgatgacatcctcgatttcacctcaagcgaaaaagagcttggcaagcctgtgggcagcgatctgcttcaggggaatgtcacgcttcccgtattatatgcacggaaatcgcctgagctaaaagcgcgcctgatgctggtcaacagtgaaaccactccagaacagatcaagccagtgatcgaagagctgaagaaaacggatgccattgaacaatcgttcagggtcagtgaaatgtatttaaacaaggctttcgaactgcttgaaacgctcccgaaaaaccgggcgcggacggcactgggccaaattgcgaaatacatcggcaagcgaaagttctaaaaaacgtcaaatgagtcgaaagtatgaatattctccaccctttattgattaattgtttgaaaaatgctatatttctgttgtagtgttgaaagcctatacatattagcggggtggagaatcgactatggaaaaaacctttgtgatggtaaaacctgacggcgttcagcgtcagctgatcggcgaaattttgttaagattcgaacgtaagggcttacaattaatcggagccaagctgatgaaggtctcagaagagacggcaggcgagcattataaagaacataacgggaaaccgtttttcggcgaacttgtcgactttattacttcaggcccggtattcgccatggtatgggaaggcgaggacgcaatcgcggtcgccagacagctgatcgggaagacgaaccctaaggaagcgcttccaggtacaatccgcggagacttcggcatgtttgtcggaaaaaatatcattcacggttcagattctcctgaaagtgcagcacgcgaaatcaacttgttttttaaagaggacgaacttgttgaagacgagaaattaatgaatcaatggatttactaaaaatcagctgaaaagctgatttttttatatggaatagaatggctgccggcgggcgggcttttttcttttaaagatacaaatttaaaagaaaacaagctataattgtactcatatcagcacgacgattaggagagaaaacatggacaattacagtttcttcgttgataaatggaaaaaaatgactggtgtggatttggcattgtacaaagaggcgcaaatgaaaagaagactgacgtctctatatgagaaaaaaggatacggcgatttccgcgagtttgcgctcgctttagaaaagaatgaagctcttctgcaggaaacattggacagaatgacaatcaatgtttcagaattttacagaaactataagaggtgggaggttctcgaaaaaacgatcctgccgcttttaaagcctgcgaaaacgctgaaagtttggagcgcggcttgttcaaccggggaagagccttatacattatcaatgattttaagcagacagaaaggcctcacagactatcagattatcgcaacagatatcgatgacaaagtccttcagaaagcgaaagaaggcgtatatcaggaaaggtccctgcaggaagtgccgaaagagatgaaagaactttattttacgcaagacggaaaccgctttaaagtcaaagacgagatcaggaaaaacatccgctttcaaaagcacaatttactggctgatccgtatgagaaagattttgatatcatcgtatgccgcaatgtgctcatttattttacggaggaagcaaaagaaaagatctatcataagttcagcggcagcctgaagaataagggggttttgtttgtcggaagcacggaacagatcttcaatccggaaaaatacggttttcaatcgacagatacgtttttctatcaaaaaagttagctgactttttataaagggttatgttatagttttacttaaaagcgttaatgtgatgaagggagaacgaaagcatgaggtatttaacagccggtgaatctcacggtccgcagcttacgacaattatcgaaggagtcccagcggggctttatatcacaaaagaagacatcgattacgagcttcaaagacgtcaaaaaggccacggccgcggacgccggatgcaaatcgaaaaagaccaggcgcggatcacaagcggtgtaagacacgggcgttctcttggatcgccgatcgctctcgtcgtcgaaaacaatgactggaaacactggacgaaaatcatgggttcagagccgatcacggctgaagaagaaagcgaaatgaaacgacagatttcaaggccgagaccggggcacgccgatttgaacggcgcgatcaaatacgggcacagagacatgcgcaacgtgcttgaacgttcatctgccagagaaacgaccgtccgtgtagcggcaggagccgtcgccaaaaagatcctttcccagctcggcattcaagtggccggccacgtgctggagatcggcggagtaaaagctgaaaaaacaaattacgaatctatcgaaaacttgaaaaaagtaaccgaagagtcccctgtcagatgctatgacgaagaagcgggcaggaaaatgatggacgcgatcgatgaagcaaaagcaaatggggattcgatcggcggaatcgtcgaggtgatagttgaaggggtgccggtaggagtcggcagctatgtccattacgaccgaaaactcgacagcaagcttgcagccgccgtactgagcatcaatgcttttaaaggggttgaattcggcatcggctttgaagccgcacgcaaaaacggcagtgaagtccatgacgaaatcatctgggacgaagaaaaaggctatacgcgggcaacaaaccgtctcggcggtcttgaaggcggaatgacaacgggaatgccgattgtcgtcagaggtgtgatgaagccgattccaacgttatacaaaccgcttaaaagcgttgatatcgagacaaaagagccgtttacagcgagcatcgagcgttccgactcctgcgctgtccctgccgcaagcgtggtggctgaagcggttgttgcatgggaaatcgcaaatgcgatcgtcgagcagtttggcgttgaccaaatggaccggatcgctgaaaatgttgagaaaatgagaaagcttgcgagggagttttaatgaaatcacttcaaatcgaaaccgcttctttgtcctacccggtattcatcgggggaggcattagaaaaaacgcggcagagcttttgtcatccttgaaccttccgatgacgaaactgcttttgatcaccgacgaagaagttgataaacgctatggagaagagctgttcagtcttctccgcagcaaatggcccgtcaaaaaggttgcggtgccaagcggcgagcaggccaaatccatcgatatgtttatgaagctccagacggaagccattcaatttcgccttgaccgctcgtcatgcattgtggcgctgggcggcggtgttgtcggcgatcttgcaggattcgtcgcttcaacttttatgaggggcatcgattatgtgcaattcccaacgactctgctgtctcatgacagcgcagtcggagggaaagtggccattaatcacccgctcggaaaaaacttaatcggcgcttttcatcagccgaaggcggtggtatatgacaccgaatgcctgagcacgcttccggaaaaagaaatgcgttcaggtcttgcggaagtcattaagcacgcatttatccgtgatgaatctttcttgaacgaattgcttaaacttgattcaatagaagcgattacgaccggccagctcagtgaaatggtttacaaaggcatttcgattaaagcggaagttgtctcacaagacgaacgcgaacagggaatcagggcctatttgaacttcgggcatacgcttggccacgccgttgaagccgaatacggctacggagagatcacccatggcgatgccgtcgctttaggcatgcaatttgctttgtttgtcagcgagaaggtgctgaattgtcctgttgaccgtacgaaaatcgccgcctggctgaaaaatctcggctatccggaaagcgtgaaacgcgaagtttcaacagaagcccttatcaatcgaatgatgaacgataaaaaaacacgcggaggcatcattcagtttgtccttctggataagatcggcagtgtgcggctgcactcctttaaagccgaagaaatcgaacgatggctgaatatgtggagattggagggagacaaatgatgatgcgcgggattcggggagcgacgaccattgaccgggatacagaaaaagacattacggagcggacgaagcagctgatcggaaaaatgatcgatgaaaatcgactcaaacctgaacaagtcgtacagatcttaatttctgctacttccgatatacacgctgcttttcccgcgaaggtcgtcagaacgtttgacggctggcagcatgtgcccgtcatgtgcatgcaggaaatggatgttgaacacggccttaaaaaatgcatcagagtgatgatgacggttcagacggatatgcggcaggatgaagtccgccatgtttatttggaaaatgcagtaacgctcagacctgatttatcattgacaaaaaatactgaattgtaatacgattgtagaaaccttgaaatacacaggagtgtgtatggggttttagtttagaaaagctgagtatgagactagggtagattgagaatgagttgagatgagctgagttgagacaaaacgtttattcattctacccaaaagacgctgttcttttgggtttgtttcgttttcccctcgtcaattcaatcatttgtcctctaaaggccttcttctcattctctccgcctgaaagggagtgagagatagttgagtctgcaaaccgattttgcctctttttcagaggattcttcacactttaaaacgataccgattattgagagtttttccgtcgatacgctgacgcccgttcaattggtcgagaagctgcaggaagacatcgtctatttgctggaaagccaggatgaaacctctgcatggtcaagatattctttcatcggccttgacccctttttgacgatcaaagaagaacgcggccggtttcacgcctgcgatcaaaagcagaagaagctttattcggcttcacagttaaaagacgttctcgaatggatgtcggagacgtattcgatcaaagcgcctgagctcgacatcccgtttacaggaggagcggtcggctatttaagctacgatttaatgccgctcattgaaccgtccatcaaagggcacagcaaagaaacggaaatggcaaaatgcctcctgtttgtctgccggacgatgatcgcttatgatcacgaactgaaaaagctgcatttcatccactatacaaggcttgaaggcagtgaaaatagggaggaaaagcgccgcattttcaaaaaggggaaagaagagctcaagcagcttacacacaggctgtcagaccggaaaacgccgaaagagctgtttcttccgcaaggacggcacacggcccccagctttgaagggattcaatcaacatatgagaaatcccggtttttggccgatgtcgatcgcttgaaagaatacattaaagcgggagacatttttcaaggcgtcctttcgcaaaggttcgacattccggtgaaggtcggttcttttgagttatacagagtgctgagaatgatcaacccgtccccgtacatgtactacatgaggcttcctgaccgcgatctcgtcggaagctcgcccgaacgtctgatccatgttcaaaacggccatcttgaaatccatccgatcgccggcacaaggaaaaggggcggtgatcaggctgaggataagcggcttgaaaaagaactattggctgatgagaaagaaaaagcggagcattacatgcttgtcgatttggcgagaaatgatatcggcagagtagctgagtacgggtctgtccaagtgcccgagtttacgaaaatcgtttccttttcgcacgtcatgcacatcatttcgatcgtaaccggcactttaaaagcgggtgtccacccggttgacgctttaatgagcgcatttccggccggaactttgaccggcgctccgaaaatccgcgcgattcagcttttaaatgagcttgagcccgaaccgagggaaacatacggaggatgcattgcttatatcggatttgacggaaatatcgattcgtgcatcacgatccggacgatgagcgtgaaaaacggagtggcgtccattcaggccggggcgggcatcgtagccgactccgtgcctgaaaaagaatgggaagagacctgcaataaagcaggggctctgttaaaaacgattcaaatcgcagaagaaacgtttctcgaaaagggggaggacggcaatgaacgaactgctgaaatcatgcgttaacggacggacactgaatgaaaccgaggcacacagcatcatgcgcgacatgatgaccggctcgctgagcgctgcggaaatcggaggcctcctgtccgttctcgcctacaggggagaaacggctgaagagattacgggatttgtcagagccatgcgggagcaggcgcatacaatagacggaccggagcatgttgttgatacgtgcggaaccggaggagacggaagctccaccttcaacatttccacagcggctgcgatcatcgcttcatcagccggggcaaaaatcgcaaaacacggtaatcgatccgtttcttcaaaaagcgggagcgctgacgttctcgaatatctcggcgtttctattcagacgtcgcctgaagaaacgattaagagcattgaacgccgaaatatgggattcctgtatgcgccaagctatcactcttccatgaagcacgtggcaggcgcgaggaaggatctggcttttagaaccgtattcaatctgctcggcccgctcagcaacccgatgaaggccaaacgccaggtgatcggcgtctactcgatcgaaaaagcaaagcttatggcccgcgctcttgaagcgtttgaaccggagcacgtattgtttgtttcgagccgggacggtcttgatgaactgtcgatcacatcgccgacagatgtaattgaactgaaaggcggcaaaacatacgaatacaccgtcgagccgggcgatgttggactgcctctcggaaggctgagagacattcaggtggcgacgcctgaagaaagcggccgtctgatcgtcgatattttgaaaaaccgcggtccggactcggctgttcatatcgcagcgtttaatgccggagccgctttatacgtcgcagaacaggcagcggatttaaaagagggcgttgcgctcgctttagaagctgttgctggcggtgaagcgctcaatcagctggagcgattaaaacagaaagaggaagagttgtatgcttaatcaaattattgatagaaaacgagaagacatcctaaagatcaagctgccggaagatttaaaactgccaaagcggtcatttaaaaaagcgctcctttctccgaaccggtttgtcgctttaattgcggaggtgaaaaaagcttctccgtcaaaaggcgtgattcaggagggttttgagcccgtcaagatcgcaaaacaatacgaacaggctaaagccgattgtttgtctgttctgacagatacacctttttttcaagggaagaacagttatttgtcagatgtgaaacgctcggtttccctgcctgtgctgcgcaaggattttatcattgattccattcaggttgaagaagcggaccgcatcggagcggatgcgatcctgctgatcggtgaagcgcttgaaccgcaaaagctgtttgaactctatcagcaagccgttgaaaaaggcatggatgtgctcgtcgaagtacatggcgaagagacgcttgagggcattttaaatgtctttacacccgaaatcatcggcgtaaacaatcgaaatctaaaaaactttgaaacgaccgtcggacaaacggagcgaatggcgaaactcgttccgccggggaccgttctcatcagcgaaagcggcatcggaaaatcggaagacctgacttttgtaaaaacgtgcggagcccaagccgtgcttgtcggcgaatcgctgatgagagagacgtcacagctgaaggctgtctatgcgttattcggagaggacggctgatgaagaaaccgagtctaaaatattgcgggattcattcattggaagatttaaaggtgacagcccgctcgaaagccgattatctcggatttattttcgccgaaagcaaacggtcggtagacccggcggatgtgaaacggtggtgcggcgaaacggatacgccaggtaaaaagcttgtcggcgtttttgttaatgaaaacatgagccgaatggctgaaatcgtaaaagatgcaggcttggacgtgatccagcttcacggagatgaaacggcggcagacatcaagcggcttaaaagcatgacagactgcgagatatggaaggcgctccctcacgggaatgataccgtacagagcatggcttctttcgcaccttacatcgacgggtatgtcatcgactcgtctgtcaaagggatgagagggggaacgggagtttcgttttcgtgggacagcgtcccgctgtatatagatgcagcccaaagagaaggcaagcgcctgtttatcgccggaggcgtgaacccggacacaatcgcagatcttttaaagcggcgtccgccgggaatcgacttggcaagcggaatcgaagaaagaggcagaaaaagcgaaaagctgatcagccttttagaagaaaggatgttcgaacatgtattcatatccgaatgaacaaggcaggtttggtgattttggcgggaaattcgtcccggaaacactcatgcagcctttggaagaaatcgaaaaagcgtttcttgaactgaaagacgacccttcatttcaaaaggattatcaaaagcttttaaatgactactcaggcaggccgacggctttgacgttcgcagaccagctcactaagcagctgggcggagcgaagatttacttaaaaagagaagatttaaaccatacaggcgcccacaaaatcaacaatgccctcggccaggcgctcctggccaagaaaatgggaaaaacaaagctcattgctgaaaccggtgcaggccagcacggtgtggcggcggcgactgtcgccgcgaagttcggcttatcatgcatcgtcttcatgggggaggaagatgttgccagacaatcgctgaacgtgttccggatgaagctcttgggagcggaggtcgtcccggtgtcaagcggaaacgggacattaaaagatgctacaaacgaagcgatccgctactgggttcagcattgccaggaccatttttacatgatcggttccgtcgtcgggccgcatccgtatccttatatcgtccgcgaatttcaacggatgatcggcgaagaggcgaaagcgcagttttatcaattggagcaaagcctccccgataaagttgtcgcctgtgtcggaggcggaagcaatgcgatcgggatgttcagcgcgttcattgaagaaactgttgaactgatcggagtcgaagctgcgggaaaaggtgttgacacacctcttcatgcggccacgatcacaaagggtacaaaaggcgtcatccacggttctttgacctacttgattcaagacgagtacggacagatcatcgagccttattccatctcagccggacttgattatccgggagtcggccccgagcacgcccatcttcatcaaacagggcgcgtcacgtatgaatctgtcacagatgatgaagcggtctcggcattaaggctgctgacagagactgagggcattttgccggctattgaatccgcccatgcattggcaaaagcatttgaaatcgctaaagaactgccgagagagaaaagcgttctcgtctgcctttcaggcaggggagacaaagacgtccataccttgatgaaggtgttggaagaagaggtgaatcaagatgttcaatctgaaaaaacagccgtccgataagctatttgttccgtttattacagcgggagacccgctgccagaaatctcgatcgagctggcaaaatctcttcaagaggcgggagcgtccgcccttgaactcggggttccgtattctgatccgctcgctgacggcccggtgattcagcgcgcatcaaaaagggcgcttgacaacgatatgaacatcgtaaaagcgatcaggcttggcggtgaaatgaaaaaaaacggcgtccatattccgattattctctttacgtattataatcctgtgttacaattagatacagatcactttttcgctttactgcgacaaaatcagctagacggactccttgtaccggaccttccttttgaggaaagcgtatatttgcagcagcagtgtaaaaaacacgggattacctatatttcgctggtcgcgccgacaagcgaatcgcgcattcaaaaaataacgcagcaggcggaaggttttgtgtattgcgtttcttcgctcggtgtcacaggtgtgcgcaatgaattcgaagattctgtttcttcatttatcaggtctgttaaaggaatgagctccgtcccggttgccgtcgggtttgggatttccagctccaaacaagtggagatgatgaatgaactggcggacggcgttgtcgtgggaagcgcccttgtcagaaagatcgaggagctgaaagacgaactcgtcgcccctgagacaagggaacaagccttaaaggcgtttgaggcatacgctaagacatttagcggatcgtacatggtaaaatgaggtgacagaatgttgcaaattaaagaacagttaaaacaattaacgccttaccagccgggcaaaccgattgaagaggtcaaaaaagagttcaacctcgaccgggtcgtcaagctcgcttcaaatgagaatccttacggctgttcagaagcggcaaaggaagccctccagattgaggtgcagcaaatggctctctatcctgacggctatagtgcggcattgagaacaaagcttgcctcccatctcggcgtaaatgaaacgaacatcatcctgggaaacggaacggacgaagtcattcaaattatttcccgttctttgttggaccctgcctcaaacactgtaatggcgaatccgacattttcacaatacaagcacaacgctgtcatcgaaggagcggaagtcagagaagtcggcctgctcgaaaacggctgccacgaccttgatgcaatgctgaaggcgatcgatgaacagacgaaggttgtctgggtttgcagcccgaacaatccgaccggaacgtatgaatccggccgcaacttgatccgtttccttgaaaaagtgccggaacatgtccttgctgtcgttgatgaagcttattacgaatacgtaacggctgaagactaccccgagaccatcccgcttctggagcgctttccgaacctgatgattctcaggacgttctcaaaagcctacggtttggcgtctttaagggtgggctacgggattgcttctgaacagctgattcaggcgattgagccggcgagacagccgtttaatacaaaccggctcggccaggcggccgcgcttgccgccctcggcgatcaggcatttatccacgactgtgtgagaaaaaacaatgaagggctcaaacagtactacgatttctgtgatgagcacgggctaaattactatccttcacaaacgaactttgtgctgattgattttaaacgggatgcagacgaacttttctcagagctgctgaaaaaaggctatatcgtcagatccgggaatgcgctcggctttccgacgttccttagaatatcggtcggtacgaaggaacagaacgaaggctttttgaaaacgttagccggcatgttgtaagaggtgatgattcagtcacctctttagtctattgatgaactaggtgataaaaaatgactcaaccgaatgaaacgattttgttggccggtttgggcttaatcggcggttcgatcgccctggccatcaaaaaggaacacccgggcaaacggattatcgggtttgacgtgtcagaagagcaggcaagggctgcacaaaagcttggcgtaattgatgctccggccgcttcttttttagaaggggtgaaagaagcgtcgactgttttcttagcggcgccggtcgaacagacgcttcacatgcttgatgagcttgccgcttcaggcatcaagaaaaagctgctcattacagatgtcggcagcacgaaacaaaaggtcgtcagccatgccgaaaaagtgctgccggatgactacaggtttatcggaggccatccgatggcaggctcgcataaatcgggcgtcgctgccgccaaagacttccttttcgagaacgcgttttatattttgacgccatccggctccgccggcaaagaagcggttgcttctttaaaagatctgctcaaaggaacaaatgcaaagtttgtggaaatgtctcctgctgaacatgacgctgttacaagcgtgatcagccattttccgcatatcgtggcggcgagtctcgtccaccagaccgtcaaattcgaagatcagtacccgctcgtcaagcgttttgccgcaggaggcttccgcgatatcacgaggattgcctcaagcagcccggcgatgtggcgcgatattctcttgcacaataaagataaaatattggagcggtttgacgaatggaaacaagagctggacagaatccagtcttttgtcgaaaatgaagatgcagacgggctgtttgaattttttcggcaagccaaggaataccgcgacggtctgcctttgcggcaaaaaggcgcgattccttccttttacgatctttatgtcgatgtcccggaccatccgggggttatttcggaaattacggcgatcctcgccgacgagcaaatcagcattacgaacatccggattatcgaaacaagggaagacataaacggtgttctcagaatcagctttcaatccgatgaagatcgaaaacgcgccgaaaaatgcatccaaacccgcgcaaaatacgaaacattttatgctgattgaggtggaacacatgaaaagaggaaaaatcagttcactaaagggagagcttcatattccgggagataaatccatctcccatcgttctgttatgttcggagccatggcagaagggaaaacggtcatcaaaaactttttgccaggagccgactgcttgagcacgatcgcctgctttcggaaaatgggtgtcgaaatcgaacagaatggcagtgatgtcaccgtccgcggcaaagggctcgatcagctcgctgagcctgccgagctcctcgatgtggggaattccggaacgacgatcaggctgatgctcggcattttggcggggcgtccgtttcacagtacggttgccggcgatgagagcatcgccaaaaggccgatgaagcgtgttacagaaccgcttcgaaaaatgggggcgaaaatcgacggccgcgccggaggggaatacacaccgctttctgtccgcggcggacatctgaaggcgatcgattttcagtcgcctgttgcaagtgcgcagatcaaatcggccgttctgcttgcgggtctgcaggccgaaggcaccacaacggtgacggagcctcataaatcaagagaccatacggaacggatgctgtctatgttcggcgtcagccttcgggaagatgaaacgagcgtgtccattgagggcgggcagcagctgaaagcagcagaagtctttgtgccgggtgatatttcatcagctgcgtttttcctggcagcagcatcgcttgttcctggcagtgaagtcgtgcttcgcaatgtcggactcaatccgaccaggacgggaatcatcgatgtcttgaaagaaatgggagccgatcttgaaatcgaagaaaaggacacaggaaataccgagccgtacggcgatctgagaatcaaaacgtcctctttgaaggcagccgaaatttcgggcgatttgatcccgcgcctcatcgatgaaataccgatcatcgcgcttctagcaacacaggctgaagggacgacggtcattaaagatgcggctgaactcaaagtaaaagaaacgaaccggatcgataccgtcgcctcagagctgaaaaaaatcggtgcgaacatcgaaccgacggaagacgggatgaagattcacggcaagacgcctcttacaggcggcgcgaaggtctcaagccatggggaccaccggatcggaatgatgctggggatcgccgcctgcatctgcgagcagccgatcgacatattacagcccgaagctgtgagcgtctcatatccttcattttttgaacatatcgaaaagcttgcagaaaaagcctgaagcattgtgctcaggctttttctgcccggaaaatcatgaaagccgggcatttgctcataaaacgaatgttttcggcatagcttgtcttaacagaatcaatctgcttccatacagctgtgcgggcaacatatttgccggaaaccgccgcgtgaattatgatagtaagtaactcaccgcgatatgccggctgatacggccggtgatgaattgacgaaagaaagggacgtttagatttgaatacttctattcaagaagccataaaattagttgaagcaggccacccggaaagcggattgaaaaaacttgctgatatcgagtctgaccttcatgatgaagacaaagccatagtagcccagctgtattacgaatggggaattgtcgataaggctatcgccatcgtgactgacctccatgaactgtatccggatgaaacagaactgacatgcttttatgccgaactcctcatcgaaaccgatcaggaagaaaaagcgctcagcgtgctcgaaacgattccggaaacagacgaggcgtacccgcagtgcctgcttttaatggctgatctctatcagatgcagggtctgtttgaagtcagcgagcaaaagctgttaaaggcgcaagccattttgccggatgagccggttatcgattttgctttgggagagctgtattttactcagggagcttacggcaaagcggtccgtcaattcaaaaaagcggccgaagaagaagccgtcatcggcggcgtcaatgtgtaccaaaggctggcggaatcattaagttcatccggagcgtttgaagaagcgcttgaatggtatgaaaaagccgtcaaggagaaccccgagcccaacacactgttcggctttggttttacggcactgaaagcggggtatcctaaaactgcgattaaacagctgacagagctgaaggaaatggatcccgcttattcttcgctttacaagcctctggccaacagctttgaaacagaagggctttatgaggaagcattcgaaacggcaaaagaaggaatccgtgtcgatgaattcaacaaagagctttatctttctgctgcaaaagcagccttaaaaacgaaaaggcattcggaagcgaaggagctgcttcgtgaagcgctggcgctggatcccggatatctggaagccgttcatacactgcttgccctgtttcttgaagaagaagacgatgagagcatcattgaactcgttcgggaagtgcgcaaatacggagaggatgatccgaagttcagctggcatctggcatcggcgttcgcccggaccgaagcgtacgacaaagcccgcgaggaatatgagaacgcatttttgcactatcgggatgacgccgatttcctttacgaatattccatgtttctgcttgaagaaggacggcggaaagaagcgctgcctctgctgaaaaaactggcagagctcgacccggcaaacgaggaagtccaggagacgattttcagaatcgaagatgaaaattcctttgaataagcaggatatgatcggtttgtgtggaatttataaagtaatacacaagatgcgatagaggagggaataacatgcagacccctgtttctgtcaatgaaaaaaaagattttatccgctggtttctcaaccattatcagctgaaacgaagagagtgtgtatggattctgaattatttaatgagccatgactcgctgatggaaaaagtgcattttgtcgagcaggccgaattttgtccgaggggcattatcatgtctacccactgcgttgaggaagtgccttttcgtttttataaagaaaatgtcatgacgaccgatgcagaaaaatcatttcatgatatcaggctgaataagcagcaggatctctttatccagctgaacttccgctcagcctataattctccggaatatgcggctgtactcgaagccaatccgcatattccgaaagacctatatgaaaatgaaaaagataaaattgtcgctgaacagattttggagcattccattgccacttttcagagacaaaagctgctgcgggaaatcgacgaagcgcttgaccgccaggataaagaaagcttcgaaaaactagctaaacaactgagccagctgcgataatccgctgccaatcaagccttgccgaaagcaaggcttgttcagctctgagaaagcgctgtcaaaacggggaggacgaaagccgtgaaatggaatacgcacgatgcggatgtttacttgaacgcgaaagaatacatcgatacagctgtcatccctttaatatcggttgatcttggagatcagtttaaatcggccgtatcaaaaggggaatttacgtctatacttgcagaagaactcgaaaggcagctgaagggcagaatctacctgtttccgccctgtacatatttagaagcggatgaaaaatcggcgcagcatatcgccgatttaaaagaaatggccgaaaaacattttcgccacatcgtttttttaacgacggatgaacgctggaagcagatgctcgacagcgagcaaaagctgctgtgggttccggcgattcctctcgaacatatgaaggattcgttaaagcagaagctgctggaagatcaaattgagcaaatattgaacattttgttacaatattggaactcttgataaaaacacttacatttcctttgtataatgattttgggaatgttgaccttcctaaaatattgatatattatgagggtgtcctagtttcatgaatttttttctatttcagttatattgtagctggggacttgaggggggatatgaagatgagcgaaaaaagacatcgggtatccagacgtcagtttttaaactatacgctgaccggagtcggcggctttatggcggcggggatgctcatgcctatggttcgcttcgcgctcgatccggttttaaggccgactgaagatcaggacatggttcaggttgtcagcgttgatgaattgacaaatgaaccgcagcgcttcgattttaaaatcaaacaagtggatgcctggtacgaatcggaagaatcgagatcggcgtgggttttcaaaagtggggacgaaattgtagctttatcaccggtttgtaaacatttggggtgtacggtcaactggaacagcgatcctaaaaatccgaataagttcttttgtccgtgccattacggactttatgaaaaggatggtaccaacgtgcccggaactccgccgcttgctcctttggaccgctatgagcaagaggttaaagacggctacctttacttagggaaagccaagccgaggaaggatgggtgatcatgctaaacaaaatttatgactgggtggatgaaagacttgatattacgccgctctggcgggacatcgccgaccatgaagttcctgaacacgtaaacccggctcaccatttttcagctttcgtgtactgcttcgggggattgacgtttttcgtgacggtgattcaggtgctgtccggcatgtttttgacgatgtactacgttccggatattaaaaatgcctgggaatctgtttattatttgcaaaatgaagtggcgttcggacagattgtaaggggaatgcaccactggggtgcaagcttggtcatcgtgatgatgtttcttcatacgctcagggttttcttccagggggcttataagaagccgagagagctgaactggattgtcggcgttttaatcttctttgtcatgcttggtttaggttttacaggctaccttttgccttgggatatgaaagctctgtttgcgacaaaagtaggtttgcagattgctgaggcgacgccgctgatcggctcggaaattaaaacattgcttgccggtcatccggatattgtcggcgctcagacgttgacgcgcttttttgccatacacgtctttttcctgccagccgctctgttcggactgatggctgcacactttatcatgattcgcaaacaaggaatttctgggccgctgtaaacgagcgactcaattgagaaggaggggatggcatgaaaaggggaaaagggatgaagtttgtcggtgattcacggatcccggcggaaagaaaaccgaatattccaaaagattattccgaatttccagggaaaacggaagcgttctggccgaatttcctgctgaaagaatggatggtcggagcggttttccttgtcggttttctcgtgctgaccatcgtgcatgagcctccgctcgagcggatggcagatccgaccgataccggctacatacctttgccagactggtattttctatttctttaccaattgctgaaatacgaatatgctgccggaccgtatacggttgtcggcgcgattattatcccgacaattgcgttcggagcgcttttattggcgccgtttcttgacagaggccctgaaagaaggccgtttaaacgcccggttgccgtagggttgatgcttttggcgatttcagcgacggttttcttaacgtggcagtccgttgtcactcacgactgggccgctgctgaagagcagggtaaaatcaaggaagaggccgatattgatacgagtgcggaaggctataagatttatcaggagcagggctgtatctcgtgccacggagacaacatgcaaggaggagcggcaggcccgtctctcgttgacaacggcttgtctcctgaagagattgcgaaaatcgccaaggaaggaaaaggcgaaatgcctgccggcgtttttaaaggatctgacaaagagcttaaagaactgtctaaattcatctccgaaacaacggcgaaataaaacggttgtcaagttgatgaaggcaggctatactcttgatagagctgaagctgacggcaagtcagcctctcgggctgtcgacaatgtcgatggccttttcaattttgaccgctgctgacagtgaaccggcacggaagctggaaaggccgccgcttctcgacaggtgttctgcggtcaatctgtgaagctgacccggcggcggctttttttatttaaagagactgtgagttgattgctttgaaactgatttcctacatgctcgctcaaaagccgatgcttctgctgcttttgatcattaatttcttcggtacggtttacgggtattattggtaccttccgcagctgacgaatacgccagcgaagtttctgatcttcgttcccgacagcccgacggcgaccttgttctttttattcgttctcatcggacttttattgggaaggaatgctccgctttttgaggcgcttgcgcttgttacgcttgtcaaatacgggctgtgggcggttgtaatgaatgttctcgtgcttgtggtgaccggaagccttcattggacggggtatatgctgatcgcgtcgcacttcgcaatggctgtgcaaggcgtgctgtacgccccgcatttccggttcaaagggtggcatttggcgcttgcggctgtttggacgctgcataacgatgccattgattacttgtttggaatgatgccgaattattctatgctcgatcaatatatgccgcagatcggctattttacattttggctcagcatcgcttcgatcggtttggcctactaccttgtcttgtcccgaaaagcttttaagctgtaacactgcttcacaatcttggtctaaccttgtccctctcttcatacgctttaatagaaggagtgggagggaccgtaatgatacgaaaggtgatcctttgcatgatgcttgcgcttgtttttcctgcggccggtttgaaagcgaaagaatcatcggctttgcaggaattgacggaactgtcggatacggtattccagctaacaaggcagtctcaatatgaggaagcggtacaaattcttcaatactttgaaaaaaggctgaaagctgcggagaaagacgggacagaggatatgatgacaggctcggaaatccgccaggtcagtctggcctatcatgatacgctgaaaagtctggaaagcgaagaggtcgcacaccaggagaaatttaaagccgccgcccagtttagaatgctgatggacgccattgaatcagatcatgatccgctgtggagcagtttgaaaaagccgatcatggattctttcagcgctttgaaagccgggattcagaaagaagacaacttgacattcagggaaaagtggaatcattttttatccttgtatgatacgatttatccaagcttaacgatcgatgtttcgccaaagcagttaaaaagcgtctccaaccatattgcagtcgtggaaaacggaggcttccagcaaatgacggaaagcagcaagctggaaaggctgacgcttttggaaaaagatttggaagatgtgtttgatcaagtagaagaagatgatgcagacccttccctgctatgggtcatcctgacgacgggaagcattatcctctcgacgctgacatacgtcggtttcagaaagtataaagccgaagaggacaggcgcagaaaaagagaaaaagattggccgaaataagaagctccgctgatcgcgagcttcttttttgctgaccttcaatcagcgggtgatgggatttttgttctcatcaagcgtaaaaccctctcccagcacgtcgtgtacgtcgcttacggctacaaaagcgtgcgggtcgaccgaagtaatcacatttttcagctggaaaacctcatttttcggaacgacgcagtataaaatgtcccgctccgtcttcgtataagacccttgaccttttaaaactgtgacgcctctttccatttcttcaatgattttgcgctgaatctggtcgttcttttcagagatgatggtggcgccttttgcggcataaccgccttcctgcataaagtcgatgacctttgaggcgacaaatacggcaacaagcgtgtacattgcttccttataggaaaggtaaaaaataagggataatgtaatgacgcaggcgtcaaacacaaacatggctttgcccatcggcacttgaaaatatttgttgatcagccgcacgataatatcaacgccgcccgttgttccgccgtatctgaaaataatgcccaatccggtgccgataaacacgcctgcaaaaagtgccgcgagcgcaagatcgttttgaagcggcatatgaatctggaagcgctgaaaaatccataaaaacaccgacaggctgactgtgccgagaatggtgtatgagaagaccgttctgccgaggagtttccagccgatgaagaagaccgggatgttcagcaccagattggatatggaaggatcgatattaaacaggaaataaagcagcagggtaatgccggtaaaaccgccttccgacaagttgttctgcatattaaaatgaacgagtccaaaggaaaaaacagcggcgcctgctaaaataaacaggacgttcttcattctgatgtctccgaacataaaaaaactcctttccttccataagctggcgttaatattatagtgtatccgttttaaaacagcaaactcgtcttaaacatttgtcaaacttatttgaattcgctaacatgtaagagatgacaggaggttttgccagcatgacgaaagaaaaaacgatgaaagatatacagcgtgaagtcgacgaatatatcggccagtttaaagaaggctatttcagtccgcttgccatgatggccagactgacggaagagcttggcgaactggcgagggaaatcaaccatcattacggagaaaaaccaaagaaaaaaaccgaatcggaaaaaaagatcgaagaagaaatcggcgacgtattgttcgttttagtttgtcttgcgaattcgcttcatatatcattggatgaagcgcatgatatggtcatggagaagttcaacacccgtgataaagatcgctggacaagaaaagaagaaggaaagtagaggagaatcaagatgcaaaaggataccattaaaatcgcaatagcaggaccgcgcggaagaatgggaagcgaagcggtcaaacttgttgaagataccgcacattttgaacttgtcggtgcaatcgaccgtacatataaccgtgaaaagctgtcagatgtgatgacgtcaagttcagatgctgtcatttacaccgacatcacggaatgcttttcagaaacgtctccggatgttctgattgatttgacaacgccggaaatcggcaagctacatacaaaaatcgcgttggagcacggcgtccgtcctgttgtgggaacgacaggattttctgagagcgacttgaacgagcttatggaactgaccgatgagaagggaatcggagctatcatcgcgccaaacttcgcgctcggagccgtgctgatgatgaagttttcgcaaatggctgccaactattttaccgatgttgaaatcattgaacagcaccatgatcaaaaacttgacgcgccaagcggaacggccttgaaaacggcggaaatgatttcggctgttcgcgaagcgaaaacgcaggggcacccggatgaaaaggaaattctgccgggagcaagaggcgccgatcaaaacggaatccgtctccacagcgttcgtctgccgggattgattgcccatcaggaagtgatgttcggcggagacggccaaaccctgaaaatccgtcacgattcatacaatcgcgcatcttttatgtctggtgtgaaactggctgttgaacaagtgatgaaaatcgatcagcttgtctacggccttgaaaatatcatagagtaacaagaagggggaaatcgctttgaaaatcgccttaattgcccatgaccgaaaaaaacaggatatgattcagctgacgaccgcttataaagacattttaaaaaagcatgagctgtttgcgacaggaacgaccggtttaaaaatcactgaagcgacagggctgcccgtcgtgcgctttcaatcggggccgcttggcggtgaccagcagatcggcgctttgatcgcgaaaaatgacatcgatcttgtgatttttctgagagacccgctgacggcccagccgcacgaacctgacgtgtcagcgcttatccgcttgtctgacgtttatgccattccgctcgccaccaacatgggaactgcggaaatcttgatccgttctgtcgaggaaggcgcgtttgagttcagaaacattgtccacggcagggatcgcgatgcttgatatacttgctttcggtgcacacagcgatgatgtagaaatcggcatgggaggaaccattgccaaatatactaaaaaaggctttcaaattggaatctgcgatttaacccaggctgaactgtcttcaaacggaacagtcgaaacgagaaaaagcgaagcggcgctggcggccgaaattctcggcgccagtccgcggatttccctcacgctgccggacagggggctgtttcccagccaggcggcgatcagggacgttgttgccgtcattcggaaacataaaccgaagcttgtctttgtcccttatccaaaggaccggcatcccgatcacgggcacgcagcggaaatcgtcgaagaagcggtcttttccgctggtatacataaatacgaagatgcagaaaaacagccggcccataaagtccaaaacgtgtactactatatgatcaacggttttcacaaacctgagtttgtcatcgacatttctgaaacgatcaatcaaaaaaaggatggccttgctgcttatcagagccagttcacccgttcccggcagtcggttgaaacaccgctgacaaacggatatattgaaacggtcgaagccagggaaaagcttttgggaaaagaggtcggcgtcgcatacgcggaagggtttttttcaaagcggactcttctgttaaacaacgatttatttgggggcggatgatgaaacagttaaaaatcggaatcacatgttatccgagtgtcggcggatcaggaattatcgccaccgagctcggcaagctgcttgcggaaaaaggacatgaaattcattttattacatcaagtgttccgtacaggctcaataaagtgtattccaacatctattttcacgaagtcgaagtcaatcaatatgccgtttttaagtacccgccgtatgatttggctttggccagcaaaatggcggaggtggcaaagcgggaacagcttgatgttctgcatgcccactacgcggtgcctcacgcgatttccgcttttttagcgaagcaaatgctgaacggaaacattaaaacggtcacaacgctgcacggcacagatataaccgtgctcggctatgatccgtctttaaaagacctgatcaagtttgcgatcgaatcgtctgaccgcgttaccgcggtttcttcggctcttgccgcgcaaacgtatgatttgatcaaaccgaacaaaaaaattgaaacgatctataattttgtggatgagcgcgtgtatttaaaaaaacaggagcatcattcgctgaaagagcagtacggcattgcacctgatgaaaaagtgatcatccacgtatccaatttcagacaggtgaagcgcgtacaggatgtcatccatgtattcagccgcattgtcaaacaaatgaaatcgaagctgattctcgtcggcgacgggccggaaatgaccgtgatctgccagcttgtcagacagctcggattaaaagacgacgttcttttccttggcaaacaagacagcgtagaagagctttacgccatcagcgatttaaagctgcttttgtccgagaaggaaagcttcggtttagtgctgcttgaagcgatggcctgcggcgttccgtgcatcggcacaaatatcggggggattcccgaggtgatcaaaaacggagtatccggttacttggtcgatgtcggagatattgaaggtgcagctagtaaggcgcttcatttactgactgatgaaagcctgcagcgccagtttgcggaagcggcgctgcaaagcatcaaggaacgcttttcttccaacaaaatcatcgcgcaatatgaagaaatttatcaacaattaacagactgggagtgtgacaatggaggatctctttttgaaggctcttcctctccttcgtgagctgaaaaaacacggctggcaggcctactttgtaggcggagccgtcagggatgcccaaatgaacagagatgtcggcgatattgatatcgctacagatgcatccccggaagaaatcgaagccatttttccgaaaaccgttgatgtcggaaaggaacacggaaccatcatcgtcctctttgagggagaatcctacgaggtgacgacctttcgcgcagagcttgaatatgaggattacagaaggccgagcggcgttcagtttatcaaatcgctgaaggaagacctgaagaggcgggatctgacgattaatgcgatggcgatggatgaagaaggcagactgatcgactatttcggcgggctccgcgacatacgggaaagattgattcaaacggtcggcgacccggcggagcgttttcacgaagatgcgcttcgcatgctgcgggcgctccgttttatgagtcagctcgagtttgagctttctccaaatacaaaaaaagcgatttgcgaaaaccgtccgctcctggcccatatttctacagagcggaaaacggttgaattcgaaaaacttttaaaaggaaaagcagcaggccgggctctggaagcagcggctgaaacagggctttacaaggagcttccggggctggacggcaaaaaggagcgcgttctggctgcccgagcttttcctttttatcaacttcaaaaaagtgccgatatatgggcggctttcattcacatgatatcgatcaatcccgctgaagcgcaccggtttttaaaagggtggaagcttccggggaaagtcatcagacaggcgctccatacggctgaacggatcgatcaaaaatgggatgccgtctcgatgtatgaggcgggggaagagacgctgctggccgcatctgccattcgcagcttgagggacaagcaggcaatcgatgaagagcagctggctgaaatcagacagtcgtaccaggcgcttccgattaaaagcctgaaagacctggcggtatctggaagcgatctgctgaatttcagaaagaagccggccggaaaatgggtgtccgatgatttgaaacggattgagcgggccgtgttaaacggggagcttgccaatcaaaaaaaagccatagaggagtggctggattcatgcagtcaaatttaagaaagaaactcattcaattgtttaccgaggcagacggcgaattcatttctggccagaaaatcagcgaagagctcggatgctcaagaaccgccgtttggaagcatatcgaagatctgagaaaatcgggatatgaacttgaagcggtccgaaagctcggctataaaatgataaaaaaacccgacaagatcactgaagatgaaatcaggctcgggttaaaaacgaaaaaaatgggacagacgatccattttcaggatgtcgtttcatcaactcaaaaaatcgcccacgaacttgcaaacaacggtgcgcccgaaggaacgatcatcgttgccgacaagcagactgaaggaagaggaagaatggcgagagcatggcattccccggaaggaaacggcatttggatgagcatcattttaaggcctgaaattcccgtgcaaaaaacgccgcagctgacgcttttagccgctgtagcgatcgttcaggcaatcgaagagcaaaccggcatcgcagccgaaattaaatggccgaacgatattttgatcaacggcaaaaaagtggtcgggatcttaacggaactgcaggcggaagctgatcaggtccattccgttattgtcggaacggggatcaacgtcaatcagcttgcagccgactttccggaggaattacaagaaacagcgacaagccttcgtctcgcaagcggtgaaaaaatcgacagagcggctttggtccaaacaataatgtcgacgtttgaaaaaaggtatgaagactatctcgcctacggttttgaaccgatcaagcttttgtgggaaagctatgctttgaccctgaaccgcgaattgacggcccggacgctgaacggaacgtttcacggcaaagcgctcggaatcgacgaagaaggcgtattgatcctggaaacgagtgacggcatcaaaaaaatatactccgctgatatcgatattaatccgtcatagttggaacgatccatgcgtttttggtatacttcggatgggcagtatcctctgggaactgcacctggaaagcatgcaacttataaaaaaacagtctgccttgatccaaaaaggactgggacagagggatgattcttgccgaacacggacgatacgaaatccttctccttgccggaaggtttttttgctgtccgaaaagatgcagatgcaagcacggcagctcatctcctctgaaaaagaggaggagaaaacatgaagacaaaaactgactttctaaaaatgaaacaagagggagagccgatcgtcatgctgactgcctacgattatccggcggcaaagcttgccgaacaggccggcgtcgatatgatccttgtcggcgattcactcggcatggttgtactcggccttgactcgaccgtatctgttacggttgctgatatgatccaccatacaaaagctgtcaaacgcggggcaaaagatacgtttgttgtgacggatatgccttttatgtcatatcactgctctttggaaagcgctctgaaaaatgccgcggcgatcgttcaagaaagcggggcagatgctttgaagcttgaaggcggcgacggtgtgtttgagacgatcacggctttaacacgcggcggaatacctgttgtcagccatttaggcttgactcctcaatccgtcggtgttttgggaggctataaagttcaagggaaagatgaagaaagcgccggcaagctgattgaagacagcaggcgctgtgaagaagcaggcgcgatggcgctcgttctggaatgcgtcccggcagcgctcgctgaacggatttcaaaggagctcacaattcctgtcatcggcattggagcaggtgctggcacggacggacaggttctcgtttaccacgatgttgtcggacacggagtaagccggacgcctaaatttgtcaagcagtatgcacaaatcgaccagccgcttgaacaagcgcttcggggatatgttgaggatgtcagaagccgcgtgtttcctgaagatgctcattcgttccgtatcgatcagcaagttcttgaaggattatacggagggaaataggcatgattcagatctatacagcaaaagatatacaaaacttaacgaaaaattaccgcaaggaaggcaaaaccatcggttttgtgccgacaatgggcttccttcatgaaggtcatatgtcgctagtagaaaaagcgcgaaaagacaacgatattgtcgtgatgagcatttttgtcaatcctatgcagttcggtccgggagaagactatgaagcgtatccgagagatattgaaagagaccgtcagcttgcggccggctcaggagtggacgtcttgttcactcctgagcctgaagaaatgtacggccaggagccgacggttaccgcaagcgtgaaaaagcggacggatgtcctttgcggccgttcaagagaagggcatttcgacggtgtcgcaacagtgctcacaaagctgttcaatctcacgtctccgacaagggtttatttcggcatgaaggatgcccagcaggttgccgtcgtcgacgggctgatcaacgactttttcatggatatcgagctgatccctgtcgaaacaaaacgggaagaagacgggcttgccaaaagctcaagaaatgtcaatctgcgagctgaagaacggcaggaagcaaccgctctttaccgagctcttcagcgcggcgccgagctgatccgcaatggagagagagacccggaggccgttaagcgggagattcggagcattctggaaaaaacgagtggtgttattgattatgccgatatttattcatatcccgatctggagatcagggatccattgactggaaaagtcatcatagcggttgccgttcagttttccaaagcccgcttaattgacaatatcatcgtcgatatcccggcagatcaaaaggaggatttgtgatgtaccgtacgttaatgagcgcaaaacttcacagagcgagagtgacggaagccaatttgaactacgtcggcagcgtgacaattgatgaagatttgctggatgctgtcggaatgatggcaaatgaaaaagtgcaaattgtgaataataataacggggcccggctggaaacgtacattattcccggtgaaaggggcagcggcgtcgtttgtttaaacggagctgccgcccgccttgtccaggttggagatgtcgtcatcatcgtgtcttatgcgatgatgtctgaagaggaagcaaagacccataagccgaaggttgccgttttgaacgagagaaacgaaatcgaggaaatgctgggtcaggagccagcccgtaccattctgtagcccccttgcctttagggggctttcatatcgtttggaaagagcgaaagagaagaagccggttttgaagcttttcccccgcgcctttttaaaacgtgttacacttttgtcgaaggtatcgaaattgaggtgtccattgaatgaacaatcaacgatatgtggtcattgatgtggaaacgacagggaattcgccgaaaaaaggcgacagaatcattcaaattgcagcggttgtgattgaaaatggacagataaccgaacgtttctccaaatatgtgaatcccaatcagccgattcccgcttttattgagcagctgacgggcatttcgaatgaaatggttgaaaatgaagaaccattttcggcgattgccgaagatatttttgagctgcttcatgacagctgttttatcgctcataacattcattttgatcttgcttttgtcaagcatgagctgcagctggccggctttggtgagattgaatgcagcgttctcgatacggtggagctttcgagaatcgtctttccgggttttgacggctataaattgacagagctgagcgaagagcttcagattcgccatgaaaacccgcacagggctgacagcgatgcggaagtgaccgctttgatctttttacatatgatggacagactgaaaaggctgccgattcccgttttgaaatctatcagacgtctatcctggcatttgatcagcgacgcgcaggagctttttgacggcttgattgctgaaaaaggcgccgatgctgaacttgaggccggctttacgaaggtcggttcttttgtgatcaggactcctgaagtcgaggatgaagaggccggccataagagccgggttccgcagacagagccgctcatttgggaaagagacggcgggctttcttcattggacgaccggtttgacaagagagaaggtcagacaaaaatgatgcgggaggtctggaccgcttttcaaaatcatgagcatgcgttaatagaagccgctactggaatcggaaaatcgctcggatatctcgtgccggctgcaattcacgccaagcaaacaggcaaaccggtcgtgatcagcacatatacgacattgcttcagcagcaaatgataaaccgcgatatcccgcttttggaaaagatttttccatttccggtaaaagccgcggttttaaagggccgctcccattacttatccattcgcaagttcaagcatattttacaggaagatgatgacaattatgatagcgtcctagcaaaagcgcagattctcgtctggctgacagacacggaaacgggcgatttatccgaaattaatctcccgtcaggcggaaagcttttatgggacagactggcatatgattcgcattcatatgcagaaagcagcaacatgaggaaattgtgtttttatgaaagagccaaagcgagggcccagaaggctgatatgatcattaccaatcatgcgcttctgttgactgacgaaaccaatcagcgaatccataccggagatgccgatatgttcattattgatgaagcccatcattttgagcgcgcggcgggcgagcagtatggagctagagcagactatgtctttctccacaaaagattgatgaggctcggcaccctcaagcagaggggtattttgaaaaaagccgaacggctctaccggtcggcaggcatttcatcagaatcctttttccaaatggacgaatggctcgctcagcttcttgaagaaagcgatctattctttacggctgttcattcttttgtcaagaggaggaaaccaagaaacgatctaaaccgtctcttatataagatcggcgaaaccggtgaaagcagagcatggagcaggcttgaagaaggcgcacgaagactgtgttccatgctgtatgacatgcatcggctgtttatggatcaaaagaaaagcctcgctgaaaaacaggcttctttcacaagccgtcaggcgtttttgttagaggaatacgattcgtgcatgaacgaccttgaagaatatcgaaagacgctcggccgcttgatgtttgaccctgttgaagatgaggtcgtctggattgaaattgacgcgaagggcgcaaaaaacgccgctgctatttacgctcagccgcttgatacaagcgaaattctggccgaccggtttttcaccgagaaaaaaagcgttgtcctcacatcggggacgcttgtcgtcgagaactcttttgactatatgatcaaaaagcttggtttaagcgatttctatccgaggaccttgcaaatcgagtcgcctttttcttatgataaacatatgaatatcatgattccgacggatgtcagcccgattcaaaacgatccgggagactatattcaggatgtctcgcgttacgtcaaggcgcttgcaaaacagaaagatgccaaagtgctcgtcctgtttacgtctcatgatatgctgcgagacgtctaccatacattgaaaaatgaggaagactttccttgccagctccttgcacaggggatttccggcggaagtcccgttaaggtcatgaagttgtttaaatcgtatcctcatgcggttcttctcggaacgaaccatttttgggagggcgttgactttccgggtgatgagctgacgacgctgatcatcgcaaggcttccgttcagaccgcctgaccatccggttgaatcagcaaagtgcgaccgggcaaagagaaggggagaaagtccgtttcaagcggtatctctgccggaagctgtcctggccttcaggcagggaatcggcaggctgctccgctcagagaaagacagcggaacggtcgttattcttgaccgccgcatccgaacctcttcctacggcacggtgtttatgaaggctctgccccctgcaaaagtcatggagcctactttccttgagcttgaagcctacatagccgggaaaaacggctaaaagccgcataaagcggctcttaaatggtgtggattaaggttttattttttaggctgtttatttaaacggatatcccgttgtaacaactagtatggcttttgctacaaagagtatgaattacaattattgtttcgttcggaggtatttgaaaaatggaaaacaaaatcgaaattctatctactgtaagcgtcgagcactcagaagacctgtataaaatcgttgatcttttgaaccgtacgctcaaacgcgatgatctcatgttcggcctcgctctcgatgaagaagaccaaaaacaggccatttttacgatttatcgtacttaggagcagaaaatgggcaaaaaaacattaattttcatactgatatttggtattatctttttaacagcacttcttgcgggagcgaatgtctaccgtacggcaatggatcagaaagaaaacggccacgagcaggctgccgaaacagccaggcaggaagccggcttaaaacaagttgacagcgtggagacgtttgtcggtaaagaaaagcagtacattgttacaggggcagacaaaaaaggcgacaaaatgtatgtttgggtgcctgctgacaaaaagcagaaaacgctttacaaaaaagcatcagccggcattaccggccgccaggctgcaaaagctgttcaggatgagggcctgatgtctgagcttaaagaggtgcaccttgcaagggaaggcaatgttctattgtgggaagttacatacttaaataaagatgggcagtacagtttaagctatgtggactttataaacggaaaaattcacaaaaatattacgccttagacgaaacagggggaaatcgagttgaatctagctaaaagagtatcagcgttaacaccatctgcaacattggcaatcactgcaaaagcaaaagaattaaaagcggcagggcacgacgtcatcggtcttggggcaggtgagccggattttaatacgcctgagcacatcattgaagcggctgtccgttcgatgaacgaaggacataccaaatacacgccttccggcggtcttgcggcgctgaaagacagcatccgcgataaattcaagcgcgatcagggaattgaatacagccaatcggaagttattgtgtgcacaggtgcaaagcatgctctttacaccctatttcaagtgctcctcgacgaaggggacgaagtgattattccgactccgtactgggtcagctatcctgaacaagtcaagcttgcaggcggcaaacctgtgtttgtggaaggccttgaggaaaacagcttcaagatttctccggagcagctcgaaaaagccgtcacagaaaaaacgaaggctgtgatcatcaattccccaagcaatccgacagggatgatgtatacggaagaagagctcaaagctctcggtgaagtatgccttcgacgcaacgttttaatcgtatctgatgaaatatatgaaaagctgatttacggcggaaaaaaacatgtatccattgcacagctttctccagaacttaaaaaccaaaccgtgatcatcaacggggtttccaagtcacacagcatgaccggctggagaatcggttatgcagcaggcagcgaaccgatcattaaagcgatgacgaacctagccagccacagcacgtcaaatccgacatctgtcgctcaatatggagccattgccgcttacaatgggccaaacgagcctgttgaggagatgagaaaagcttttgaagaacggctgaacaaggtgtatgaactgcttgttgacattccgggattaacatgcctgaagcctgaaggagccttctacttgttcccgaatgcaaaaaaagcggcagaatcgtgcggcttttcaagcgttgatgaattcgccgaagcgcttttggaagaagaaaaggttgcgatcgttcctggttcagggttcggcgcaccggacaacatccgtctgtcgtatgcgacatccctgtcacttttggaagaagcggttgaacgcatccgccgctttgtcgtgaatcgcagccgctagaaattaaaaagcgtccgcaggcggacgcttttttcatgcacacaacctgcattgacctgatcgatttaaaaaaggtataatatacgttatggacgtcagaaagaatgatggcttgaccgaattctttcgtgttttggagggaaacgatagtgaaaacaacaataaaccaagtgtacaagcatgttggtgaagaagtaacaatcggcgcttggatcgccaacaaacgttcaagcggcaaaattgcgtttttgcagcttagagacgggacaggctttatccaaggagtcgtcgtcaaagcggaagtggacgaagaaacatttcaaaccgctaagtctgtaacacaggaaacatcattatatgtaaaaggcgtcgtcaaagaagacgagcgttcgcctctcggctacgagcttgctgtgacgtcgcttgaagtcatccatgaagcgacagattatccgattacacctaaagaacacggaacagaatttttgatggatcacagacatttgtggctccgttcaaaacggcagcatgcaacgatgaaaatccgcaacgagattattcgcgctacatacgaatttttcaataaggaaggctttgttaaagtcgatcctccgattttgacgggaagcgcacccgaaggaacgacagagctttttgcgacaaagtattttgacgaagatgcctacctttcgcaaagcggccagctttacatggaagctgctgcaatggctttaggaaaagtcttttcattcggaccgactttcagagctgagaaatcaaaaacgaagcgccatctgatcgaattctggatgatcgagccggaaatggcttttgtcgaattcaacgaaaaccttgaagttcaagagaactatgtctcttttatcgtccaaagcgtgcttgaaaactgcaaaatagaactgaatacgctcggcagagacacttccaagctggagcttatcaaagcgcctttcccaagaatcacgtatgatgaagcaattcagttcttaaaagagaaaggctttgacgatattgaatggggcgatgacttcggcgctcctcacgaaacggcgattgctgaaagctatgacaagccggtatttattacacactatccgacatcattaaagccgttttatatgcagcctgcacctgacagggaagatgtcgtattgtgcgctgacttgattgcgcctgaaggctacggcgagattatcggcggatctgaacggattcatgatctcgagcttctcgaagcgcgcctgaaagagcacggtttagaatcggacgcttatcaatggtatgcagagctgagaaaatacggctcagttccgcattcagggttcggactcggacttgaacggacggttgcctggatctgcggctctccgcacgtccgcgaaacgattccgttcccaagactgttaaatcgcttatatccttaagaaaaaagtctcctgattgcaggagactttttcacagtcatccatgatatactggaaggtaagaggtgtatcgaatgaaaaaacagcactttattaagatgcaggatatgggagctgtcaccattccgaatctgctctttatgaactatcgggagcttggcttaaacgagacagaattcatgctgctcttaaacattaaaatgcatgttgaaagaggttctttttttccgacgccggaggaattaagcaagacgatgtcgattgaaaccgaagaatgcatgaatatgctgagaatgttcattcaaaaaggcttcatctatatagaagaatgcgaagaccagaacggcattaaatttgaaaaatattcgctcgaacctctctggggcaagctgtttgagcttttagaaatggccgagcagaaaaaactcgccgaacagaatgaaggcgaacagaagagcctttatacaatctttgaagaagagtttgcacgaccgctttctccgctggaatgcgagacgctcagcatctggcttgaccaggatcatcacgatgcacagctgatcaaacaagctctcaaagaagccgtcatatcaggaaaattaaatttccgctacattgaccggattctgtttgagtggaagaaaaacggcgtttcaacagtcgaacaagccgtaaactacagccaaagattcaggcggaagaccgctccgcggcaaaatgagcaaaaggagtatacaagacaggttcctttttacaattggcttgaacaataaagtgaaaggtgaagacatgctaacaaaaaaacagatcgagttttgtttagacacaatcggtgaaatgtttccggatgcagagtgcgaattagtccatgacaatccgtttgaacttgtcatcgctgtcgctttatcggcccagtgcacagacgcgcttgtcaataaagtgacgaaaacgcttttccaaaaatacaaaaaacctgaagattatcttgcagttccgcttgaagagctgcagcaggacatcaaatcgatcggcttataccgcaacaaagctaaaaatattcaaaagctgtgcaaaatgctgctggaagactacggaggtgaagtgccgagagaccgcgatgagctggtgaaacttccgggtgtcggaagaaagaccgctaatgtcgtcgtttccgtggcattcggcgttcctgccattgccgtcgacacccatgtggaaagagtttcaaaaaggctcggcatttgcagatggaaggattcggtcatggaagttgaaaagacgctgatgaaaaaagtgcctgaatcagagtggtccgtcactcatcaccgcttgatttttttcggccgctatcactgtaaggcgcaaagaccgaaatgcgaagaatgcccgttgttttctctgtgcagggaagggcaaaaacgatataaaaaagggctggtgaagctgctgtgacaagcgtttcactgttggacgaatacgaaaaaacgctgcggaagaaaaggccggaatccggcgaaaggcttgcggtactttctgaaaatccgctctgctatgatttttttcaagacgcaggagaggacaagccttgggagcatgcggaagaatgggtcccgcttctgtttgcagaatgggaacgcacaaaagaaaagcttctgcccgtctttaaaacgagaaaatcaaggtgcagccaggatgacatgctcaacggggtgtgctgcttgatcgcaagcctccactggacgatgggggagcctgtcaaaagtctcaactgggagatcatcacccggaaggattttggagcaaagccgatgaactggacggaacggctcgagttcatcctgctgaaaccgacgcagtaccattgttttatccagcttgacgaattgtttacggaaatgaaaaagcaattttataaatatgttgccatgaatcataaaaaagccactcactaaattgtgagtggcttttttgatcaattggtgccggttgattgaccgttggaatttgtttgttgatcacctgtgttggcgccttgatccgggtttttgtttttgtctttatctttatctttattttgatcgttgtcttgatcatcggcgtcatcatcttttctgccgttgttttggtctgaatttcccggattttgattgttttgatcggaatttcctggattttgatcattcggctgatttgaattgccgttattttgtttgtctttgtcctgatcatcatcagcatcctgcttcttctcgtcatcgtctttcttttcatcgtccgtttttgactcatcctcatcagccgcgttgactttaagcgttacagaagcagggtcgctttcaccatcttcggtaacggcagtgacttggaatctgtaaacggatccttcttttgcattcggtatgacggcttctttcgcactgctgttttgaatttcgctgtatccgcctccgtcaacagactgtttgactttaaaggatacatcaccgtctccggaatatgaccatgaaagcttaatgctctttgatgcttcatcatactctgcgctcaaacctgacggcttgtcggcatcttctttttcttcatattttttcgaaacggtcgtcggctgtgtgccttttacaaagtactcagtgacttttttatcgctaggcgtgttgctgctggcgagcaccggcgggttcgagccttttagaacggtcgcttcaacgacgctgtcaggcttttcaaatgagccgctgccgttgtccaccttggcaatcagttttttgaataggagcttggcgacttgctgttcgctctggctcagcgaattaaagccttctttaccggtccagaccgctgcggtatattgcggcgtatagccgacgaaccatgaatctctcgctccgtttcgatttatgccgtgttttctaatgtcgtcctcggtaaagttcgtcgtacccgttttacctgctacagtgacgccggggacttgagccgctgttcctgttcctcgctgaacagcgcttttcagcatatccgttatcataaatgcggtataatcgctcatggcagcctttgattcaggcgtcaaatcaagcttagtgccgtcattgaattccaccgcggtaacagtatgcggctcattgtagtagccgttgttgccgaaggcgctgtacgctccggccatttgcagaggcgacacaccatttccgaagccgccgattgcataagcttccactaagtcatctgaatttatgttaaggccaaggttgcctgcaaattttacaatattgtctttgccggctgcctggaacgcttttaaagccgggatgtttcgagaatcgaccagcgcctctctcatcgatatccagcctctgtagcttctgtcatagttgttaatcggatctccagttgaatacgtgtatgcttcatctttaatctgttcatacgtcgaccatttcttgttctcaatgacagggccgtagtcaaggattggcttaatcgttgaaccgggttgacgtttagtatctactgcatagttaaagtcgcctgctttccggtcgcgtccgccgccgagcgcgcggatctctccggttttcgtatcgagcagggtgaggccggcctgcattttttcggtatactgaatagaatcgccgtccatcagctcatccacataatcctgtgcgtctgtatcaatcgtcgtgtaaatcttcagtccgtccgttcccggagtgacgttcgctttttctttcacttcggcgacggcctgctcgataaacgcgctgtatttgttggacgttgtttttgcgtactctttcggagatacaaggccttttgtgacggctacttttttcgctttgttgtactctgcgtcagagataaagccgtgtttattcatcaggctcagcacgacattgcgccgtttctcggctttttccggatgtttgatcgggttgtagttattcgggctttgcggcatgccggcaagcgttgcggcctgctcgaccgttaagtcgtttagatctgtaaccccgtagaactgctcagccgcttttccgacaccgtaggcctgcggcgagaagtaaatccgatttaaatacatttcaagaatttcgtcttttgagtattttctttccagctggaaagacagccagacttcctggactttccgtttcagcgttttttcatgtgacagaagggagtttttgacgacctgctgtgtgatcgtacttccgccttcagaaccaaatccgccttcgaagtttgccagaagcgctcctccgatccggatcgggtcgacgccgtggtggtcatagaaacgggcgtcttccgttgcaagaaatgcgtttttgacggaatccgggatgtctttaatcgacacgtacgtccgtttttccgaaccgatttcggcgatttcttttccgtttttgtcatagatggtagaagagtacggtgtcttcagttttgcttcatcaagggacggcgagtccgctaccatcaccgcaaaagtgacgcccccggcaatcaagccgataacaccgatgattaaaatggataaaagaattttcttaaacaatcctgcttttttctttttcttgggtttagaatgagtattagacctgcttttgccctgctgggcttttcgccgttcctggcggctgttaaattgatctgacataacatctcaacctttcgtagttaaacctttccgctcacatgactttaaaatcataatttatgatggcgaaaaatacaactgatcaataatcttaatataatcaattcttggcgagtatccaagtgaaatggggtgagcggcttcctgaagctcgtcttttcggatcgattttctgccgttttgctttttccgctcccagaaataaaataatttttctgcttccaaaaaataaatttcttcaaaagcggatatgataacaaaacaaatgccgtcttgcgccacaacctgcttcatatgctcgatctgatgatcgtggaaattctgaagcgggaacgaggttcggctctttgtttctttcgcttcaaaatcgatgtagcggcctttataaaccccattataatcagtagttgacgactgcttgaaatatgcttctttgataaccgcagcgcttcgcttcggataatcgacctggacaatctgtacaggtgtcggttttttatggatgaccgcaatcgaatgagattgataatacatattcgtttcattcaggtcatcttcgagggtcatgccgcgattggaatacgacggcttcttttgcaaggatgaggcagctgttttcggctgataggatttgccgttcgggtaacgaatcactttcttcatcctccttttacaaaaaatctggatactaacggaagtggctgatcttgcacaacactttttccgcggcggagctgacgagccgcattcaagagctgaccgcaaaactgaacaaggacaatatctcacggacaaatgcctacaaacgctactttgaccgccatcctgaaatcaagtggtcgcttttggcttcatttgtttcccggaatgccggctggtcgatgaccgatttaaaagggcgcttattcgagctcggacttacggcttttcagcagaaatggctatttttagcgtatgagagagcgaactggctgatcttttcagacgcctatccgcagctcctgctataccattggtccaagcagcttggccagccgctgtttcatttgctctcctcatttggcgtgtcttcatttatgaaaacggagtgggaacggttctggcatgagcgcgatcaaaagcggctcatgtacgctctcattataaatgaacaaaacactatccaaactcctattatacaaaatcctttgtttaaaaagaatgtttttcagacgattccttttcagctgtgtgaatggtttcacttcaacacggtcattttcccgacggttgaaggcgttttttacggtgtgtctgtcaaacgcttcaccagtttaaaggaaaggatcaagctcggcaagcaattaagcgagctgctgttttcgcctgagcttttccccggtttttttcattttacatcatgtgttccgcataccgggtcgcgctttgatatggagcgctgggcaggggttaaaatcagaacctcgccgtttttgagaacgtgttatcccgttgttgcccattcattagacggattaaaatgcgattggtttcgcggaggaaagagggaggcgatgttcaaagatgaaaaactgccgaaaacgatcgaaatcaccgattggtattttcaaaaaagaaggcagctgcaggcattgttttcgctggagcattggctgaataagaggtgaaaacagaaaaaagcaagggttctccttgctttttaagtagacgggcggttaggtccgcctaatttcttatccagtgtgtctgtttgtttagcatctggttttgttttcgcaggtgatttctttttattgttttccacagcgggcacctccttacctttttagattttgcaaaaaagcgctgatcataccatttttcgcaagatcacttgtcgaaagcggcgcgtttggctggaaaatgagtttctttggcggtttgcttctagttttgtcagctgtggaggagagagtgcgcataagggagaatgcatagaaggccatcaaaaaggagggaagcaaatgaacggatttgcaagcaaagactcggtccttcaaatgcttttggaaacggaatcagacatgtcgtctgcggagaaggctttgacagaagccgtacgccggacggagcaggaaaagcagtctgcctggaacgaacggctcgatctgattgaaaaagagctggcagaactcagctcatgtttaaacagcacgttaatgggagtggagcccggggtagagacggcttaagccggattcgttgtaacggccgtcttcctttggtacgataaacccgaggtgaaaaaattggatacacaatctcttcttatacagacacaggatttaatccgccttgtaaaagaagcggaagaacgatatagaaagggaaaagaggaagggacggaatacgattttttcgaggttgtcaaaccttctgtcgagaggttcgaacaaacagtgaaaagctggctggcggaaagcctgtcttatatcaaggccaatcggccaaaatacatttacgaagaacagctcaactcggttgaggaaaatgcgaatgaaattttcatgcagtcctatttctgcaaaattcataaaaaacgctttaaagatctgacggaatccgtcctctacacgctcaaaaacgtagaagacgatatattaaaagaagaccgggcctaatcccggtcttctctttttatgagggctgttatttagctggcgtccgtattcatatcataagcagggtgctgtgcgccattcgcttcaagaactttcatacttgtgcgaaattcgtttaatgtcagatgtccctggatatacaaaaacttagcgaaatccatcagtttgttcatgcagtctgtctcatactgtttcatctcggcaaaacaatttcttaagtatgatacgttcatatggtgcatcccctctccttttatattaataatatagtaccataacaattcgacttttttctgtttttcaaatattaaaattttcgacactttttgacaaacttgtgacagaacctttggaacgagaaatgcctctatatcatacacttataaaaaagggctataggaggagaggaaagatggaagagaggagatccgccgtatatccttattccggccctggtgcgcatattcaagcctatcagcaaaaccatcaggcctatcatcccgttcagccgtacttcagccaggaaagcgttccgtacgcccatcctgcacagcggccgcagccatatcagcagccgattgagcagaatttggacccgttttcagtctatcatcagcctgttcagcagcaaatgcagccgcttccgccgtttcagggatttccttatcagcatccatacccttcgccgcggcctaatctccatcagccgtcacagtttcaaagctttctgtcgcaattcaaaaaaaagaacgggcagattgatttcagcaaaatgatggacaccgcaggccagatggtgagcacggtcaatcaggtcggagcgcttgccaaagggtttatgggattcttcaaataaaaaaagcatggatgaaggtcattcatgctttttttgctccgaaaatgagaccgtgaggacatttcggttccacgacgtcttcattgtttcttcacggacagggtatgggagcagaacggttctggacaggcttgtaaatgatgaagaaccgccgctttcttgtttctccttcaaggcgatatgaagataccgtgatttcgcttcaatcataatatctccattttgaaacgattcaggaacggcgatatcgacgtaaagcgccccatcatcctctctgatattcatggaaatcgtggaattctgaagctggtctgatatgagtttttggaatgaatttaaaatatcgtggaaaggcgagttgtaaaacaactgttcaacagcttcttgaatttcgtcctttttgctgagcgagtgattgtcgttttccttaaaatccattcttcatcaccctcgattttttattttcagcttatgcaggggctcttcatatggttattcattgatgggaatttgaaagtgtggttaaatagtggggaatccaacgatttggtatttaacctgttcctcttttaatagccatcataaagaggcgttttgaaaggagcccactgtattgctgaaaaaattattcggtattggtcaaaaacaagatgaagtgaaagaagaaaccgttttttcaccggttgacggacaagttttggaactttcaaaagttcctgaccccgttttctctcaaaagatgatgggtgacggaatggctgtcgagccttccgcgggcgagatcgtatcgcctgtcgacggggaagtgatccagctgttccacacaaaacacgccatcggcattcgttcattgtccggcgtggagctcttgattcacatcggtctggaaaccgtagcaatggaaggcgaaggtttcacagcccatgtcaaagaaggagacaaagtaaaagtcggcgatcctttaataacatgcgatttggaactgatcaaggaaaaagcgagcagcacaattacgccgatcgtcattatgaacggcgatgtgttggaacgcgtcacaaaacatgaagaggcagcagcgaaaaaaagcgagacaaagctcatggagcttaaagtaaagtaaaagaaaaaagcagagagcgcttctctgctttttcattttgtcaggaaatcacctctttcagaacgaacggacattcgctaaaatagaagggagaggtgacagcgttgtttcaaaaacgaaatttgacagatatgattcagcttctgaaagaagaccaagctttcagcaggcaaattgttcattggcatacaatcgagggaaaagaagcggattaccgcgattttcctgaaggtttagataagagaatcgtgcatgctttacagcaaagaggggtagaaaagctgtattcccatcaggccgacgcatttctgcacagcgccgccggcaaaaacgtgacgcttgtgacgccgacggcatctgggaagacgctttgctacaatctgcccgtcattcagaggatcacagaagaccaagatgcgcgcagcttatacctttttcctactaaagcattgtcgcaggaccaaaaaagcgaactgaatgaattaatcgatgaaatcggtgcgtcgatcaactgttatacatatgacggagatacgtcgccttcgatcaggcagaaagtcagaaaagcgggccatatcgtgattacaaatccagatatgctgcattcggcgatcttgcctcaccatacaaaatgggtgtcattgtttgaaaatctgaaatacatcgtcatcgatgagcttcacgtatacaggggagtctttggcagccatgtagccaatgtcatcagacggctgatgcggattgctgaattttatggaagcaagccgcagtttatctgtacatccgcgacgatcgccaatccattggagctcgctgagacgctcacggggcagccgatgcacctgatttcaaacaacggcgccccgtcgggaagaaagcacttcttattttacaacccgccgatggtcaaccgttcccttaacatcagaaaaagcgcgacccttgaagtgagaaagctcgcatccgaatttctaaaaaacggcattcagacgattgtgtttgcaagaagcagagttcgggtggaaattatattgacatacttgcaggaagtgatgaagccgattgtcggcccgcattcgattcaggggtacaggggcggctatctgccgaacgagcggcgcgtcattgaaaaaggccttcgcagcggggacatcaaaggcgttgtcagcacgaatgcactcgaactgggcgttgacatcggacagctgcagacatgcatcatgaccggttatcctggaacgatctcaagcgcctggcagcaggccggccgcgccggaagaaggcacaacgaagcgctgattgtcatggtggcaagttccgccccgctcgatcagtacatcgtacagaatccggactatttctttaaacaaaatcccgagactgccgtcattaacccggacaacctggtcattctcgtcgatcatatcaaatgcgcggcctttgaactgccattcaaaagaacggacacattcggcggtatcgaaattgaggatattcttgactacttggcagaagaaagggtcctccacttaaccgggaatacgtaccactggatgaatgacgcttttcccgcgcacggcatcagcttaagatcggcttctcaggaaaatgttgtgattattgatcagtcaagacgcgagaaggcgaaagtaatcggggaaatggacaggttcagcgccatgacgcttcttcacgatgaagccatttatttgcatcaaggcatccaataccaggtggaaaagcttgactgggaggagaaaaaggcgtttgtccgcgaggttcaagttgattactataccgatgccaatcttgccgtcttgctgagagttctcgaggttgacaaggagaaaaagacggaaaccgcagcgttcggttttggggatgtgaccgttcaggcaaaagcgacgatttttaagaaaataaaatttgagacgcatgaaaatatcggttcaggaccgattcatctgcctgaagaggagctgcataccaatgcggcttgggtgcaggtgaacgatagtgagcggcaaaattggaatgacatcaaattggaagaggctttgcttgggactgcaaacgttcttgggcatgtagccgccttaaaagtgatgtgcgatccatctgatctgcatgtttttccgcaaatcaaagccgttcataacgaaaagccgacgatctttttgtatgatcgctatcccggcggagtgggtctttcacaaaaagtgtatgaacaaatgcccgagatcatcagtgaagcgcatcggctgatttcaagatgtccgtgtgagtcaggatgcccttcctgcataggagtgagcggcggcgatcagacaaaaaacaatgctctgcgccttttaaaaggctggaaaggttgagcggaatgtctttaaaacgaaaacttaatcgctataagcatcacctgggaaatcaagcgaaagaagaaaaaacggaacctcccgcagataagctgacttccttgtccgtcagttttgaaaaagaatgggccgaactcggtgttaaaccatatgtgtttgaggaatgctattgcctgatcagggaagtcgtttacccgttgactcatgttcatggtcattacgcgttttctgagctgcatgagacggttaggcgatggaacaacagcgccgtttcccattcgctttcaagcaaagggtacacaccgagccagctcttcttctttgatacggaaacgaccggtctcggaggcggggccggcaatgcgatctttttgctcggccatgcaagggtgtatgacgaccgcgtagtcgtcaaacagcatctgctgccaaagccggggtacgaagccgccctctatcacagctttctgagtgaagtcgatattcagtctcttgtcacctataacggcaaagcgttcgactggccccaggtgaaaacgaggcacacgctgatccgcgacagggtcccaaagcttccggatttcggccactttgacctgctgcacggatcccgccgcctttggaagcataaatttgaccgcgtttccttagggacggtggaaaaggaagagctgggcgttgtaagaactgaagatacgccgggctatctggcgccgatgatgtattttcattttttaaaggaggaacggccggaaatcattgaaggcgttttgcgccataatgagcttgacgtgctttctttaatcactctttacatccatttatcgaagaaaatcctcactccggagcagacagcggaagcaaacgaaaagtacgcgatggcaaaatggctcctcgccaaccgggagacagagcttgcgacagcgcaattgcaagagcttgaaaaaaaaccttttgaacattctgaacgcgcatcattcgatttatccatgcagtataaaaaacaaggcatgctaaaagaagccgcagccctttggctgaagctccaaaatggagaagacggaaaaaccgcctggcgcgcaggcatcgaacttgccaaatactttgaacatcgaaagcgggatattcgggccgctcttgaggtagcggaaaacctgctggagcagcacggttcacaaaagtttgagctgaccgaaaaagaaatggccggcctcttgagaaggcgcgagcggctggaaaggaaatacggacgaaatattccccgggcaagcgcagaaaacgacgatcttcgaaagccaaacatttcaagcacgttatgaattgtagaaaccgatcgcttcttgtaaaatagcgttagaatcgtttgaagggagcgtcgatatgtataaggggctgttttatctgttttttgtcgtcgtattgtttatcgtattgatcatgacgaatttcaaggaaagctttatggcttacttttaaaataggtttttatattagtacatgtttaccccctgcttcatagtttaatagtgtatatagaagcttaaagaaaggggaattttcatgcactgtaaaccgcatgtaatggcgccgattgttcatcctactcaatgctgctacaaccatacgcacagcaaaaccgtcgtaccgcacattcacccgcagcacacaacgaatgtcaaccatcagcattttcagcatgttcattactacccgcaaactcaatcagctgtcaacaaggcgtcacatcagcacttcgtgagccctggagcaggaatgatgcctgggcctggagggatgccgggacctggaatgggcatggggccttactaaaaaggtttttcggaagttttgtcaggatgaacgagcgccggattgaacgtgactaacagaatatttttaaaaaaatggggcggaatacggccccattttttagcaggtgatcataatgaaagtattggccgttacagggtacaagccgtttgaactcgggattttcaaacacgatgacaaggccctgttctacataaaaaaagcgcttgaaaaccggatgatcgctctccttgaggaaggcctggaatgggtccttatctcgggccagctcgggactgaactatgggcggcggaagtcgcgttttcgctgcaggaagaatatcccgacttgaaagtggcggtcatcactccgtttttggaacaggaaaagaagtggagcgagaaaaatcaagagcagtatgaagccgtgctcgcagccagcgatttcactgaaagcttgacacacaggccgtacgaaagcccggtgcaattcaaacaaaaaaaccggttcttcatcgaaaaggcggatggcttattgattctgtacgatgaagaaatcgaaggctcgcctgtgtatatgctgaatgaagcaaaaaaggctcaggaaaaacgcgattttccgatctacacgattacgatggatgacttgagagtcactgttgaagaatgcagcttttacgaagagtaaaaagtgcaagagaaaatttgacattgcacacgttttctgaaaaaatataagatgatgattcacgatatgaggtgaaaaagatgcttgctgataaagtgaagctttctgctaaagaaattttggaaaaagaattcaaaacaggagtcagaggctacaagcaggaagacgttgacaaattcttggacatggttattaaggactatgaagccttccatcaggaaatcgaagaattgcagcaggaaaacctgcagttgaaaaaacagcttgaagaagccaacaagcgacagccggctcaatcaaatacgaccaattttgatattctaaaacgactttccaatttggaaaaacatgtatttggaagcaaattatacgattgatgaaaaccgcttgccctttagaacaaactaagctataatagtggatgtcttaacgttcgggtaatcgctgcagattttacatctgtagaggaaagtccatgctcgcacggtgctgagatgcccgtagtgttcgtgcctagcgaagtcataagctagggcagccttgcagaaggctgacggcaggaaaaaagcctacgtcctttatggatatggctgagtatccttgaaagtgccacagtgacgaagtctcactagaaatggtgagagtggaacgcggtaaacccctcgagcgagaaacccaaattttggtaggggaaccttctggacggaaatgaacggaaggaaggacagagttgactctgtagatagatgattaccacccgagtacgaggcttagcagccgacggcagtacgacggaacaaaacatggcttacagaacgttacacactattatgatgatgacaatgtataagctctccgcaggtaggagagcttttatcatgtaaaaaacatacataaaaacaggtgatataatgaaaacctatacattaatcgcaacagcgccgatgggaattgaagcgatcgtcgccaaagaggtgcgcgaccttggatatgattgtacagttgacaacggtaaagtcgtgtttgaaggcgatgccctcgccatctgcagagccaatctgtggctgagaaccgctgacagggtgaaagtgcaggctgccgaatttacagccaagacctttgacgagctatttgagaagacaaaagcgatcgactggagcgcctatcttcctgaacacgcgtcattccccgtgacgggaaagtctgttaaatcagtgctcgcaagcgtgccggactgccagcgcatcgtcaaaaaagcgatcgccgagaagctgaaatcagaatatcagacacagggcgagtggcttgaggaaacagggccggaatacaaaattgaagtctctcttttaaaagacaaagcggtcataacgcttgattcatccggagccgggcttcataaacggggatatcgaaccggccaaggggaagcgccgctgaaagaaacccttgctgcagctttgattctattgacaaattggacgcctgacaggcctttcgtcgatccgttttgcggttcgggtacgataccgatcgaagccgctttgatcggccaaaatatcgccccgggtttcaacagggattttgcatctgaaagatgggaatggatcggtaaagaagtgtgggatcaagcgaggctggaagtcgaagaaaaagcgaattatgatcagccgctttcaatctcggggtatgacctggatcatcgcatgatcgaaatcgccaaggcaaacgccgaggaagctggactcgccgatttcatcgaatttaagcaaatgcaggtaaaggattttcggacgaaagaggaatacggcgtaattgtcggaaatccgccgtacggggaacgcctcggtgaaaagaaagcagtcgaagccatgtataaggatatgggcaaagcatttgccgagcttgatacatggtctgtctacatgctgacatcaaacgagcgttttgaagagtgctacgggaaaaaagcaacgaaaaaacggaagctctttaacggttttattaagacggactattaccagtattgggggaaaaggccgccaaaaccgaacaaagaaaagtgaagtttaaaggctgccatgtaaaacggcagccttttttctttccatagccggaaccgctgaacggcgtattgaattcgcgcccgctcggagttagccccttaaaagcgcatggcaaaacatcgactcactaataaatccatgaatcatttttctttttataagacgaatcatagcaatttttgcgcggctcataatagcagtcttttttgcaaggcttgtggtaatcatagtcttttttacaaggctcatggtagtagaagtcctttttgcagtaatcgtaatcctttttgcaaggcttgtggtaatcgtagtcttttttgtaatcctcatggtagtcataatcctttttgcaataatcgtaatccttcttgcaaggttcatggtaatagaagtcttttttgcaaggctcgtgatagtagtaattcttcttgcaaggctcatgatagtaaaagtcctttttgcaatagtcgtgatccttcttgtaaggatcataatcataatcccaataatctttctttgccggttcataataatacatgtactctccacctttagtctataaattttaagtccctacaggatatgatagaaaaatggaatagactgggtttttatgatggataaagagcacattgtctaacacagtccttgttatctggtgttaagctttttgtttgactgaaaaaagggtgtttgaccgctgcgaaaacggtccgccctaagagtatagaaagaaaaaacataaaatcagcctgtataaaaacgattcatcctgcatatactcgggattattcgatttgaaaagaggtgatttcatgttgaacagcgatcatattcaaatgattcaaaaagcgctggagacgtcagaaagccagctcgaggacattggcgaagagcgccttacatatgcaaaggaagaattgaaaaacgcgatcagccatatggaatcgacagatcatccgtttttgacgcattcgatttaccggaaatagttgagagaggcttcctgctccttttttcaaatctttcttgttgaatttcttgaatcatagtgataggatagaatttctgaaaactcgatagttgggggttggagcagggtgacagcatctcgtctgcctttttcattaacaaaaacaaaaaacttttatgaagaactgaacaattggatcggtgatgtattttacgatattcttcctgaaaaaggctttgatttgcgcgatgagcaaatattcatggcttttcaattagagcgggcatttaaggaaaagaaggtcatgtttgcggaagccggcgtcggcaccggaaaaacgctcgtctatcttctgtttgccttgagctatgccaggtatacgggcaagccggcggtcatcgcctgcgcggatgagacgctgatcgaacagctcgtcaaaaaagaaggcgacatttataaaatttccgagcatttaggcctgacgatcgacgcaaggctcagcaagtcgcatgatcaatatttatgtttgaaaaaactggagaaaacgatgcagcgctctgatgatgaaaaatggcttgacctttacgaaagtctgccgtctttcgttcacgaatcgcagggcatgcaggctttttatccgtacggcgaccgaaaagagaattcgtctttatcaaacgatgagtggtctgaaatcggttacgactcttttcaggactgtcttacatgtgatatgaggcaccgctgcgggctcacactgtcaagagaccattatcgaaaatcaaccgatttcatcatctgttcccatgatttctatatggagcacgtttggacggaagaggcgagaaagcgggaaggccagcttccgcttttgccggagcacagcgcagtggtttttgatgaagggcatctgctcgagtttgcggcccaaaaagcgctgacatacagggtgaaacaatccacgctcgaaatgttccttgagcgcctgctcggcaatgacatcagagaagaatttgcagagcttgtcgaagaagcgcttcgcgccaacgacgaatttttcggtttgcttacggaaaatgccgaaaaagcagaaggctctgagcgcatgcgcatcaaagacgataccgatgtgaaaaaagcggccgccgagctgtatgatttgcttgaaaaaatcggagaggcgctcgtttttgagggcgagctgtacacgatcgaccagtacgctttaactgttgtcgaagagtatttagaacagatggcttactccctttcgctctacaggaaaaatgcgatcagctggcttgaacaaaaagagcttgagtcgacattcgtcgtcatgccgagaaccgtctctgaagttctcggagaaaaggtgttctccaagcagattccgtttattttctcatcggcgacattatcggaaaacggatcgttcgattatttggcgaccagcctcgggatccgcgattacttatcatttaccgtcgattcgccgtacgattatgaagagcagatgaaagtgtacatccatcaaatcgaggaaaaagaagcgaaagaagaagcggcaatccgtgcaatcaaagaatctggagggaagacgctgatcctgtttccgtcttttgaagagcttctgtccttcaagcgccggactgcacaggaatcattttcgtttcccgtttactttgaaggggatgaagaaatcagtacaatcgttgaaaagtttcaaacggtagaagaatccgtcttgtgctctgtccatctatgggaagggctcgatattcccggagacccgcttcaaaatgtcatcatctggtcgctcccatttccgccgcatgatcccgtgtttgaagcgaagcggagcggcgtggaaaacgcctttcgcgaagtagacattccttacatgctgctaagacttcgccaagggatcggacgtctgatcagatcaaacagcgacagcggcacgatcagcatttttgcgggcgatgaaaaagaatggaatgtgataaaagaagtcgaatctgttcttcctgttcagccagtctatgtataagaaaagcggacatcccgcttttctttttttggctgcataaaagttgactttcgtaaatatttccattagtctgattacaattcgcatcatatacgggaagaggaggatgaatgatgtcgatcaatacatatgaaaaagagtttttagaaacattaaagaaaatcagccggtatgagcaggcgattaatgtcatgtactgggatatgagaacgggcgcgccgagaaaaggggaggaaagccgcgctgaagctatcggccaattgtcggcagacgtctttcagatgagaacgtccccgcggatgaaagagcttttggataccttagccgggcaaaaacaagatctgccttttgatacacagaaagcggttgaagaagcgaaaaaagagtacgatttaaacagcaagattccggaagaggagttcaaagaatatacgacactgacttccaaagcggaatccgtctgggaaaaagcgaaaaaggcgtccgatttttctctctttgctccgtatttagaaaaaatcatcgactttaaaaaacggtttatctcatactggggatatgaaggccatccttataacacgcttctggaccaatacgaaccaggcgttacagtcgaaaagctcgacgcccttttttctgaattgcgggaggctatcgttccgcttgtgcaaaagattgccgccagtgataaaaagcctgatacgggctttgttcacgatcatttcccgaaagagcggcagcgcgatgtttgccacttcttcttacaggagctgggctatgattttgaggcggggcgcctggatgagacggttcatcctttccaggtgacgatcagccaaggggatgcccgggtgaccacagcatacaatgaaaacgattttcggtcggctgttttcggaacaattcatgaatgcggccatgccatttatgaacagaacattgatgaagcgctgggcggaaccaatttatcagacggcgcatcaatgggcattcatgaatctcaatcccttttctatgagaactttatcggcaggcatcaaagcttttggacgcggtattttgataaaataaaggaagcaagccctgaccagtttgcaggcgttactgccgaagggttctacagagccgttaatgaatcaaagccgtcgctgattcggatcgaggctgatgaactgacatatccgctgcatattatgatccgctatgaaattgaaaaagcgattttcagcggcgaagtatcggtcggagaccttccaaaactatggaatgacaaatatgaagcatacctgggcattacgcctcccgacgatgctaaaggaatcctgcaggatgtccattggtccggcggagatttcggttattttccttcatatgcgcttggatatatgtatgcggctcaactgaagtcaagcatgctgaaagatcttccggagtttgaccgtctgattgaaaacggcgattttcaaccgatcagaaagtggctgacagagcatgtacacatccacggcaaaagaaaaaaaccgctggaaatcattaaatctgcgacaggcgaagaattaaacgtccgtcatttaatccgctatctggaagaaaaatatacaacactctatttgtaaaagaaaacccctcccgtctgtatgggaggggttttcgggtcagaattttctgttaaatacgaacgttcaaatgaaaaaatgtgtgcaggttcgtctttttttgttttatcccttttcattcggaacgaaagttgatataatttgatacattatatcactcatataatcgcgtggatatggcacgcaagtttctaccgggcaccgtaaatgtccgactatgagtgggcgataagaaaacgaacgtcttttagtcaaactgacggaattcgtctttttaagcattgcccgctcgcatttcaaatccgagcggacaatgcttttttttatgaagggcaattgatgaacggaggggtttaatggaaaagctaaaacgaaaaattgcagagcagggcacggtgttgtctgacgaagtgctgaaagttgattcatttttaaatcatcaaatcgatccggaattaatgcttgctgtgggtgaagagtttgcttcgcttttccgggaggaaggcgtcacaaagattgtgacgattgaatcctcaggcatcgcacctgccgtgatggccggcttgaagctgggcgtgccggtagtatttgcaagaaagcgtcaatcgcttaccttgacggaaaatctgttgacggcttctgtctattcatttacaaagaaaacggaaagtacggttgccgtatcagccagccacctttcaaaggatgacaaagttctgatcatcgacgattttttggcaaacggacaagcagctaaagggctcgtttccatcattgaacaggccggcgctaaggtgtgcggaatcggaatcgtcatcgagaaatcattccagacgggcagggaggaacttgaaaatcttggaatcagagtcgaatcccttgcgcgtattgcctctcttgccggtggaaaagttacctttttacaggaggttgggtcatgaaacttacagccggtaaaactgtttcattaagcattcagcacgtccttgccatgtatgcaggagccgttgtcgtaccgctgatcgtcggcggcgctctcggtctgacgccggctcagctgacataccttgtatctgccgacattttgatgtgcggtgtggcgacgctgctgcaagtttggaaaaaccgctttttcggtatcggtttgcctgttgtattggggtgtacgttcacagccgtttctccgatgatttcgatcgcctcgacatatggtattccagcgatctatggaagcatcatagcaggtggtgtgattgtcgtcatcatttcttttttcttcggaaagcttgttaagtttttccctcccgtggtcacaggatctgtcgtcacggtgatcggtatcaccttgattcccgttgcgatgaacaacatggccggcggtgaaggcagcagcgatttcggcgagctgtccaatcttgctttagctttttccgttttactagtcatcgtccttttatatcgttttacatcaggatttatcaagtcaatttccattttaatcggcttgatcgcaggaacagccggcgccgctctaatgggaaaagttgattttacagaagtcgcaaacgctggctgggtgcagatgattcatccgttttacttcggcgcccctgtttttgaagttaccccgatcttgacgatgtccctcgtgctgatcgtcagccttgtcgagtccacaggcgtctactttgcattgggcgatttgacggaccgccgcctgacagaaaaggatttaggaaaaggatatcgcgccgaagggattgccgtgctgttgggcggggttttcaacgcctttccttatacggcgtattcgcaaaacgtcggtctcgttcagctgacaggagttaagaaaaacagcgtgatcgcgcttgccggagcttttctcattttgttggggctgtttccgaaagccgctgctttaacgacgatcattcctaaacctgtgctcggcggcgctatggtagcgatgttcggcatggtgatcgcctacgggatcaaaatgctgagcagggttgatttcggcaagcaggagaacttgttgatcgtagcgtgttcaatcggaatcggcctcggcgtgacggttgtaccgcaaatgtttcaaaaccttcctgacgccgtcaagcttttgacagagaacggaattgttgcgggaagctttaccgccattctcttgaatgcgatctttcacattcatccgttttctcgtcatgctgaacagcctgaagcagtttctgctgagaaatctgccgtttaaaacctcacggattgtgaggtttttttgttgtgttttctcattgcggataagccatactaccggtatgaagaggaggcgtaacgaatggaaactgtgaatgagcttgtcgaacgaatcaggacgaaagacggcggtgaagctgtcatccgtcccgtcaaaatggcggatgcccctgacatcatcgaggcggtgaaagatgtgattcaaacgggcgtttacatccaaaaagaacggccgcgcacacttgaggaagagcgtgcatttatcagcgatatgatgaaaaaagacaacatgtatgcggcggttgaaatcgatggtacggtgtacggaattgcccgggtcatacgcggcgaactcaaaatgaagcggcacacgggtctgttcagaacttggctccacagcaaggcgcaggggcttgggatcggcagggaaatcatgtcctacaccctgaaatggtgcaggctgcatcgcctgcataagctctgcttgaccgttttttccgaaaatgaagcagcgctgtcgctctataagaaaagcggctttatcgttgaaggggttcaaaaggaacaggttttgtcggacgggaaatatgaagatgaagtgctgatggcctattttttcaacgggtccacataaggccgccaaattcgggagaagctgtaaacagaggtggtgttatggcctatgtcatttcggcggggacaagcattccgcgctgccatgtcgaccagaaggaagcagccgtttttgcgagggagatgttcaaagattcatttaaagacattgatcgtctgctgtcagcttttcaaaatggcgaaatcgcttcacggcaatttgtcatgcctttggattggtacaaagaggccaagagcttcaaggagaaaaatcaaacgtacattgatatggctgtcagacacagtgctgaagccgtttcgaattgtctgtcggacgaccgttttttgaaaaaagaaatcccttgcgaaaaaattgacgcgattttttttatttcctctacaggcatctcgactcccagcattgaagcgaagcttatgaacattctgcctttttcaaaacgggcgaagcggatcccgatctgggggctaggctgtgcaggaggggcttcaggtatagcgcgggcattcgaatactgcaaagcgtttccaaaagcccatgtccttgtgattgcggcggagctgtgcagtttaacgtttcaaaaggatgatcaatcgaaaagcaatcttatcggcacatctttatttggcgatggaatcgccgcgcttttaatgtgcggcaaggaagcggatttctcagaagccagatttgaggttcttccggaagtattgggctcacaatccagcaccttggaagattcggaagaggtcatgggatgggaaatcaatgacaacggttttcgcgtcgttttttccagggacattccgacattgatcaaaacacacttaaagaacgatatcgaagcatttctgaataaagaacatatcgctttggagaacattcaagtatttctggcccaccctggcggaaaaaaagttctcgacgcttatatggaaagccttggcttttccgaagcgcacatcgactgttcacgaaaaattttggccaggcacggcaatatgtcatcggccactgtgatgcatgttttaaaggaatattgcttgcatggcggccccgtgccgggaaaatacggtctcttaggggcgctcggaccgggcttttcatcggagctgctgctcttgagatggacaaaaagagagtgactgacacatgttttggacgattttaagcatttttgccgcccagcgcctgcttgagctggcagtcgcgaagttcaacgaaaaaaacgctctgaaagagggagcggtcgaatacgggaaacgtcattacccttacatcgtcgcgatgcatgtttcgtttttcgtatctttgatttgggaaacgaccgcttttcaacgcggaacccttccgatggcgcttgtcgtattgacaggcctcatcttcacgcaggttctccggtattgggcgctcttttcactggggaaatgctggaacacgaaaatccttgtcatccctggaacgaatcttgtccgaaaggggccctatcaatggattaaacatccgaactatttggcggtcgctcttgaatttctgcttttgcccctgctttttcaggcatacgccaccgcacttttatttacggtgctcaacgctgctgtcatgtacatccgcattcgtacggaagaacaggcattagaaaaattacaccattgaaaatgattatcatttcatttataatgatgataaacattctcattataggatggtgagtcgcgtatgacgatgttttttctactggcggccgtcagtacatacagtttattgattggatatgtcttaaaaggaatcgcaggagcgaatccgcaaaaataaatagatacacgtgctgaagctgccgaaaccggcagctttttctcgtttttctttccgattgtgaagaaaaatacagcaaggttgtgtaaaatgggagaaagggctaagatggcaaacaacaacgcataaaaggggtaggaaacatggcacaaataaacacgaaagacgatctgatgaaaagagccggagcggttttcggggagctcacaaaaaacggggatgacaagcggtcggcgcagcttgcgggcatcatccgaaaatggctgagaaaagaagtgtacatcgcgttaaccggacactattcagcagggaaatcatcgcttttgaacgcgctgcttcaggaagaagtcctgccgacaagtccgattccgacgagcgccaatctcgtgctggtccgccggggagaaatgaaaacaacactccatacggtcgatggaagatacgctcagatggacggctcttatgataaagaaaaagtgcaggcgtactgcagggacggcagccagattgaaatggtggaaatcggggggcctttttcaggaatagcgcctcaggccgtcttaatcgacacgcctggaattgattctacagacgatgctcattttctatcggcgtcttcgattcttcaccaggcggatgccttgttttatgtcgtgcactacaatcatgtccattccgaagaaaatgtgaaatttcttcgatcaataaaagataagatacccaatatttttttcatcgtgaaccagattgaccgccatgacgaagctgaaacagacttccacgcctataaaaagcaagttctagatatgctgctgaaagaagggatcagtgaagaacacctcttttttacatcggtcaccgcagccgatcatccgctcaacgaattcaaccggctccgtgctgagctggaaagactgcagcatcaatccgaacagcagctgcaggcatatacggagcaaaaaatcagcagcttgattcatgaacatatcaaaatgctgatcagtgacgaagatacggctctgtctgaagaaaccgcttccttaagagaaaccgtcgagactttaaaatcacagcttgccgatttgacagaacaggaaaaacgggcggaggaacaaatcaaaaaagacatccaaacgattgcccaaaacgcaaatataacgccgtttgagatgagagagctggccaaatcgtatttggaatcaatcgaaaagggctttaaaaaaggaattcttttcagtaaggccaaaacgcttgaagaaaaacaaaaacgaaaagaagcttttcttgccgacgtccaaaaaagggttcaagccgaaatcgattggcatgtcattgaagcaatcaaggcattcatgaaatgctttaacgtccagaatgatgaaatgcttcgggaagttcttcaatttcggaccgtgatagatgaaaacgacctgcttcgttcccggaaaaaaggggctgagcttacaccggaatacgtgctgaactacacgaaagaactggctgaaaacatcagaagaaaggcgaagagacaagcgcagccgctcatcgaccagctcaaaacctttattaaagaaagaagcgtcctgcaggcggaagcgataaaagctgaatatgatgcggaacaagcgaagctcgccgagcgcgaaagacggttgattgagcagcagaagtcatatgaaaaagcaaaccgtctctgggatcaatgggaacacggcaatcagagcgatctgccggcgaattggtatgccgccgaaagaaagccccttgaaaaaacgcttgatgcgaagcgagcggaaccggtccgtgcacaaggggaaaacagcagccgtaaagacgaggctcttcatccgaaaaagggcgtttctgagtccattgagcactttttcgaacttgcccggattttggcggatatcccggctttagaaaagcagagaaaagcattcctgcacaaaacggagcgccttcatacaaggcagtttaccctggcgctcttcggcgcattcagttccggcaaatcgtcttttgcaaatgcgctttgcgggcggaaagtgctgccgtcatctccgacgccgacaacggcaacgattaataaaataacaaaaccgtcgggaaccaaaagggacgggacagccgaagtcgcttttaaaacggaaggggaaatcacagctgaactggatcagcttttagatggaaaaatggcttcagcaaaaggctccgcttttggcgaaaaacttaaaaacctcttgaaaaaagaggaactgcacgatgatgaacggctgctgatcaagaacttcctcaaggcttataagcgttatggttcatatatcaatgatcaggaaatcctgacgatttccgctgacgatctgcatccgtatgtcgctgaagaacaaacggcctgtgccgtccgcgaagtcaccgtttatttgagcacaccggtcacggagaaaggaataacaatcgtcgatacaccgggagccagcagcatgaataaacggcatactgaacttgcgtttcaatacatgaaagatgctgatgccctgctttacttaacatactaccagcattcattttccaaagcggaccggtcgtttttgcgcaagctggggctcattaaagacgctttcagcatggataaaatgttttttattttaaatgcggctgacctcgcgaaaagcccggtcgaattacagacggttgaagactatgtaaggggagagctcttgaaagaaggcatccaaaatccgcacctgtaccatgtatcgagcaagcaggagctcaacaaaaaaacttcgccgtacaacgacttcagcaggctaaagcgggagctcgacgattttatcgaaaacggtttggccagaacagctgtcgaagagctgcttgatgaaggcaaaaaactgtgtgaaaccgtctttcagctccgcggttcactgcaccgttccgctgaagaaaaggaagcggagcaaaagcgcgtcgcaaaagcttatcaagaggctttggctgcgattgaagaagcagagaaggggtcatcaatccttcaaatgacggaaaaggatgtggaagagcaattttaccacatgaagcagcgtctggcctttgttgcacacgatttatttaaagctgcgatacaccccgggcttcagaacggagattggcgcgccaatctgcaaaccgctttgaaaagctgcttaaaggagtatgaattcgaatttttgcaggaactaaaagcgcttgatatcagaatggaaaatttgatgctgaaatttgcgggcgaacaatgggcaaatgccgtaaaagagcggcttgccggcaatccttatttttcggttcatatccaggctgaccggcctgagaccgaaagctgggaaacgactgaagcgtcagcggatgaaggggagtttacagatgaactgaaaatgttcaaaacacctaaaacgttttttcagcaaaatggcaaagcccggcttgtcgaggcgtttactgcaaagctttcggcgatcacggacaattggattcaacgtgaaaagcagacatttttaaaccgctgcaaaacgagcgccggtcaattacagaaagcggctgttctatccgcaaaagctcaactcgaagaacaaaaagaagcatattttcatgaggcgctggagagcgcagagcgcgaaaacattgaaaaagcgcatgccttggcaggcgaatggctccgctcatgttgaatcagattgatattggtatggatatctggctggcaggcatgatagactgaataaaaaaagaagggaattagacgatgacaaacgttcatgaagcgattacagcacattcaaaaaaacagcaccagcacatcaagcagttcgtgcgtctcgaacaggagagggaaaaagcaatcgatgatgtggtcgataagtgccggcgtaacgaagcattttcaaccgacctcatcaaccaaattacagtgcagatgaacgaattggccaaaaaaggcatcgttcccacaagacggctcgtctcgaaggaaatggttgccgaatacgtcagccgaaaatatccgcaggcctagctggtggatccttccgcgtgtggcgtcatgtgtttttgcaaaacataaaccatgacccgcccgctggaggtgaagtgtaatgggaagaacaaagcttggcaacgcgaatgcacagcgaaacaacaacgctaaaaagaagaacggctttaacactgaatttgcgactgaatcctattcgcaaatggaagccgcaaaattaatctcaagcaaaaaacagcaccaaaaatagaaacagcgtcgctagacgctgttttcatcatttttgctcctgtggtacaataagtgcattgtatgatgaaaggaagtttccataatgaacaagaagctgctgcttgtagacgggatggctttattattccggtctttttttgcgactgcggtgcaccgcaattttatgctgaatgacaaaggcgtgccgacaaacggggttcacggttttttaaagcatctgttaaccgctgcgtctgcgtttgaaccgagccatgtcatctgctgctgggacatgggaagcaaaacgtaccgaaacgatttatttaaggactataaagcgaaccggagcgagccgcctctagaattgattccgcaatttgacatggcgaaggaagcggcggaagagctcgggattttaaatatcggccttgcgggctatgaagccgatgactgcatcggcaccctgacagcgatgttcagcgaagaagcggacatcacgatcgtcaccggtgataaagatttacttcagcttttaacagtcaatgttaaagttgccctgcttcaaaaaggaatcggcaattataaggtatacacagaagaatcattcagtgaagagacaggtatcgaaccgaaagctttgattgacattaaagcgctgatgggcgatacaagcgataattatccgggtgtaaaaggcatcggcgaaaaaacggcctacaagctgatcaaggaatattcgactgttgaccggctgctggaaaacatcggtcagctgacgaagggccagcagacgaaaataaccgaatgtctagaagatctgaagatgtccagaattcttgcagaaattaaatgcgatgtaccgctttcctgctcattggacgatgcggacttcaccttgatgcatgacagggcaaaggagatgctgagacttcatcaaatacggggaatcgagccgctgctgatgaaattcgaaaaaagagagatcggataaaccgatctctctaatgttttgtattgctttttttcgcccggttttcaagctcggtttttgggtctgtatgacggttatcccggttcaatacaatatcaccctggggcgtgacaccgcctgtcagacggcctcttcctgctgaatgctgtttttccacatgaaccacctcactcgttatgatgtgcagcgggaatggaatttactcgggttggttcagcaatatcgcttttttcgcaagcttgtcagccgcttgatttgacttcgaaggaatccacttgataaaaaataaatcaaaatccttttttaagcggatgatagcatccagataaggcttgaaagcctgatttttgacaaactccgaatccgccgtgcgctcgacgatctgcgaatcggtccgaaacgaaacgatccggtagtttcgttcggcgcacagcttcattccttcgatcagcgccatgaattctgcttcatggttgctcagtgagccggcgggaagggagaaggactcggtcttctggccgtctttgataaaaatgccaagtccggacggtccgggatccccggcgcttgctccgtcaatatacacctcaaccggcattgttttcgctcctttcatccaaaggggtgatccttttagcggcataagcgtacggcgctgcgaatacggctacaacgaatttcaagacgtatgtcgtgataaaaatctgaatccatacatccagcggataagcgcccataaacgcgacgctcgtaaaaatcaacgtatcaagcagctggcttaaggctgtactgccgctgttgcgaagccacagtgcccggtcggaaggaaataaccttctgattcccgaatatacataaacatcaagcgtttggctgatgatataggcgagcaggctgccgagggccacgcggggcaagaagccgaatatcgtctccagcgcaggctgtgcgatgtcttcgggatgcggcttgaataggagcgctccctgcatgacgagcgtcaaggtaatcagaatgaaaaaaccgattgaaacggcttttttcgcttcttcctttccgtatctttcattgatgacgtcggtcgcaaaaaacacgcttccgtacaggatgttgccgagcgtcgcagtcaaaccgaacagctcgaccgttttgactacctcgatattggcggcggctgtcgcaaaaccgatccagacaaataaaccggtcttgccaaatcgtttaaaaaagaagagaacaatgataaaattaatgatcgcaaaactaatccataatatttcgttaaacaagaacgggtacttcctttctgaataaactgttttgattatagcataacaagccataatttgaataaaggtgattttgtgaaactgagagcaggaatgaaaatcaagattaaagggtcttcacccattcaatttacagccgatgaatggatcgaagtgaaagaggcagtggcggcggggcgtcagctttctcaaagcccgtatgtcactgaacttgaattcgaagatgagaagggcagcttttggaccctgaaagaactggaaaagctgaaagaagaacttgcggctgaaccggatgagatcaccgtgtattttgacggcagctatgataaagaaagtcagctcgccggtttaggcattgtgatttattactccctcggcggggaaaggtatcgattgagaaagaataagagctttcggctgacaacgaataacgaagcggaatatgcggctctctacgaagccgttaaagagcttagagacctcggggcaagcaggaactccgtcgtcattaaaggggattcgctcgtcgttctgaatcagcttgaaggcagctggccatgctatgatcccgttcattcgaaatggctggacagaatcgaaagccagcttcaaaaattaaagctcacgcccacctatattcaaatcagccgtaaagacaataaggaagcggaccagctcgcaaaaaaaatgcttgagcataccattgtggaaagcacaatcaaactagatgaataacggagatgaacgttttggataagaaagagatctttaaggaactgacacatttgcaggacacctactgtgaagggtgcttcatcaaaaaacacttcagaaaagaatacggaaaaacgtatgcccacgcattttgcatttcaaaatgtacggtcggagaaaagctccgcacctatggagacgtgctgacaaacaaaaattgatccccgaaaattcccctataggccataatccatgcaatctggggttttcgggccacgctaaaaaaccgcgttcagcggtttttttaatgctgtgattcatcaagctgatgctggcaatcatttagtatgttgagctgttcgtttaaaaaatcttcatccagtgcggctaattcctcagcctgtgacagctgtctggcatcttcaatggattgatacgccgatttcagcaaagtggagctcttttgcctcgttgccattcccgtcgttttttgagcagtttctacggcaatttcaagctgcttgcgctgattaaatccggtttcgagatcatcgcgatggtctgatttcatgatcatacacctccgacaagtattttttctaaaaaaggcatttttatgtgtaaaatagaaaaaataaagtaaaattaatccgatataactattgaacctaaaaaatataagtctttattactaatttaggtaatcataaaaaaaggagtctgaggaacagtggaaagcaatgaactgcaaaccgttcttcacaagacatttgtggaggtatataaagatcttgaacagctcgttgatatcgcgaaaaaggggcgtccatctctcgagaagaacattgaggaaatcgagcaaaggctgaagcaaaatatactggcgatcgaaattcagctgaaaattaaataggagaggcagaaattgcctctcctcttatttgaagtctcattttgtcttgattttgttaaagcttcacaacgttagatgcttgaggtccacgattaccttcaacaatttcgaaagaaacttcttgtccttcttctagagatttgtatccttcaccttcgattgcagtgaaatgaacgaatacatcgtctccgccttcaacttcgatgaagccgaagcctttttcattgttaaaccattttactttaccgttttgcatattgcttaatcctcctagtactgtagcacaatgtgctaaaaaaaattttcatcatctaacggtgttctgctaaatgatggtttcactatacactatccatggatgcttcgtcaagctgtcaagagaaaaaaatgaactttaatgctttttttaggaatttctttgaaatcgttttcaatttatggttattcatcatcaagcgggtgaaacattttaagcgtcggtccgtatataataaaaccaatatcaggaatgcgaacaggagtgtttagagatgaaccgttattcagttgatgagtttgtatccaaaacccagcaggaagacaaaggggaggggctgtttgaaatggaaacgccccgtctcttggaagtcaatctcgacggaaaagtgtgggcaaaggccggttcaatggtttcctatagaggaagagtcaaatttaagcgagaaggggtatttgaacacggaattggacggatggtgaaaaaagtgttcagcggcgaaggggctgccctgatgaaagcggaaggaaacggaaaggtgtatctagcggatcagggaaagaagatatccatcttaaacttgaaagatgactccatatttgtaaatggacatgatctgctcgcatttgaaccgtcgatccattgggacattaaactgatgaaaagaatttccggcatgctggccggcggactgtttaacattaagcttgagggaactggaatggctgccattacaagccactacgagccgctcactttgatcgtaaccccggaaagccccgtctataccgatccaaacgcaacggttgcctggtctggaagccttcagcctgaatttgtgacagatgtttcttttaagacgttcatcggcaggggaagcggggaatccatccaaatgaagttttcagggaatgggtttgtcgttgtacagccatttgaagaagtttattactcggaatcttagcatcaaaaaaacacttgcagagcaagtgtttttttgaatcgggcgttttttaggacagcgcccggacagtctgttttttgttcatgatgatttcagactgctcgataatgtccgtcaggatgacttctgatgaattggataaatgcaggcttttaatgtttttcttcatttcgtttaattttttctcatcagccaaaagggaagagactgactcaagaatctcctcatgcctgttgacgacgatggcagcccctctgtcttcgaagaacagggcattttccttttcctgtccgggaacaggcttgtaaaggatgacgggaacgccgattgccgtggcctccgtcagggtgattccgcccggctttgtgatcatgcagtctgccaccctgaacagctcgtcaattctttcgatgtaaccgagcgttctcagcttgtttggataaagggcttcaatgtcttccaatgaagatttcagcatcgtattttttccgcacacgacaacgacttgaacatcctctttcgtcaccagagattcacacagttcttttacgtttttaagaaccccgtgggcgcctgccatgatcagcaatatcttcttgtcgggagacagctgatacttctcgtagattttatctttgtccatttcttcttcaaactgcctgcggatcggaatgcccgtgatcttgacgttgctagggtgagtgccgatctcgagcagcttttccttcacgtaatcagttgctacgtaatatttatcaatatgttcgtggacccaaattttatgaagacagaaatccgtcatgacgttaaaagtcggaatgacttttcccattctccgtctgtattcgggcacgacaatcattggaaacgtattgatgataatgtctggctgatgttttttaaccagttggtccagccgtttatttcccattttgaaataaatattaaacttccttttattgtaaattttatcgactccatagtagaaaaggcgataaaactgtttgccgattgagaagcttttcaagtagagatactgcgtaatctctgacacaatcggatttgattcttgatacaaattcgaaacagttacattcttaaaaccgagcctttcgcactcttggtagagcgttttggctacttgaacatggccatttccgtaatttgcagtcaaaattaatatatttttattggtattcaagcatattcacctcaattaattcaaacagcaagagctaaaatggtaaaaaaacaggagtcaaagtccactcataccataccataaatattattttaattataaatgaagaacaaaaattaaggtatttttaaagtatggatcggcaggaaagcgctgggttccttattattcccgctttcgcggcaaagccgaatccccattgtggaagactaacccaactgtattttaacacattttgaatgtcttgcatcagaccagggcatgagaatttcatttccactcatacggcgtttcctggtaaacgtagtagttcagccaattcatgaacaaaagagtcgcatgggctttccagcggtttacaggtaccgcgccatccggcccttctttaaaataattcaccggcggatcaatctccatgttcctggctaaatccctttcatactcttctttaagagtatctgtatcatactcaggatgtccagttaaaaaaacttgtttttcatcctttgaagcaattaaacagacgcccgcttcatcggatatgctgagcacttttaaatgggaaacggctttaaggtcatccatattgatatctgtatgcctggagtgcgggacatagtagaactcttcaaagcctctgaccagtctttcatttttctccattattctgtgttcaaaaacgccaaatgtctttttcggcagtttgactttgcgaatgccgtagtgatgatacagtcccgcctgcgctccccagcagatgtgaagcgttgacgtgacatgcgttttgctccagtctaaaatctcccggagttcttcccaataggatacctcttcgtactccaaatgctcgatcggcgcaccggtaataatcatgccgtcgaattttcggtccctgattgaagaaaaagttgtataaaactgttccaaatgctgccttggtgtatgttttggcgtgtgtgtagacggtattaaaaaagtgaaatatacctgtaaaggagaattcccgagcatcctgagcagctgtgtctcggtcttgattttctgcggcatcagattaagaatcacaatatttaaaggtctgatgtcctgatgaaaagcccgtttttcatccatgacaaaaatattttcactttcaagaatctgctttgctggcaaattgataggtatgttgataggcaacacgccacctccggttttctccgctgatttttcttcattataggaactttttggcgatatttcaatgtgtgaattgtgttacaataaaagaagtgtgtgaaaaatatggaaaatcatcgtgtgatgaaccaaaaggaggctcctcttgcaaatgaaatcccatttatcagacatagaaatcgcacaaagaacggaattaaaaccgattaccgaaattgcacggaaactcaatataaatgacgaagaaatagagtgttttggttgcacaaaagcgaaaatttctttgaaaatttttgagcgtttgaaagaaaaacccgatggccaggtgattttggtaacctccatcaacccgacaccggccggcgaagggaagtcgactgtcaccgtcggattgagccaggcgctctggcagattggcaaaaaatcgatcgtggcgatgagggagccttcactcggtccgacaatgggcttgaaaggcggggctgccggaggagggtattcccaggttcttccgatggaggacatcaaccttcactttacgggagatatgcatgcgatcacagctgcaaacaacgctttggcggctttcatagacaatcatattcatcagggaaacgaattaaacatcgatatcagaaaaatcgtctggaaaagggcgcttgatctcaatgacagggcgctgcgtgaaaccgttgtcggcctgggcggaaaagcgaacggatttcccagggaagacggctttgacattactgtcgcttcggaaatcatggccgttttatgcctggccagagacttggccgatttaaaaaagcgcctggcttcgatgatcgtcgcctacacagtcgacggacagccggtaacggccggcatgctcggtgtgcagggagcgcttgccctcctgttaaaagatgctatcaaaccaaaccttgttcagactgttgaaggaacaccggcgctcgtccacggaggaccgtttgcaaacatcgcccacggggcaaacagtctgatcgcgacaaaaacggctgcgaagctggctgactatgtcgtgactgaagcgggatttggcgctgatttgggggcggaaaaattcatgcacatcaaaacgagagccggcgggttcacaccgggggcggtcgtgatcgtcgccaccgtcagagcgctgaaaatgcatggcggaacgcctctcgccgatttgaagcaaaaagacctggaagcattaaaaaggggaattgccaaccttgcgaagcatatcgaaacgatagatgccttcggtcttccatacgttgtggctgtcaacagattcgtacaggacacggaggacgagcttgaggccgttcttggctggtgcagagacaacggacatccggctgcactttgcaatgtttgggaagagggcggaaaaggcgggactgatctcgcaagggaagtcattcatgtcatggagcaaaaagacaacaggttttcctatttatacgaattaaccgactcgatcgaagacaaattagccaagatctcccgcaccgtttatggcgccgaaggggtagagtttaccgaaaaggcgaaaaaacagctgcttgaattgaaaaagaacgggttggacggactgcctgtctgcgtggcgaaaactcagtattctttatcagatgacccgggtaaaatcggcaggccgcaagattttagcatcaccgtccgcgaattaaaaccatcgaggggcgcgggatttatcgtcgctttgacaggcagtattttaacaatgccggggctgccgaaacaccctgccgcgcttaagatggatgtcgacgaaagcggcagagccaaaggtttattctaaaaaggagggaccgtcatgtccatttacgatatcagcgtcaagacgattaaaggcgaggacacgacactgcggccgtataaaggcaaagtgctgctcatcgtcaacaccgcctcgaagtgcggatttacacctcaatatcagcagcttcaagacttgtatgaaacatataaagaccgggggcttgagattctcggctttcccagcaaccaattcatgaatcaggagccgggcgatgaaaaaagcattgaagaattttgcagcgtcaattacggtgtcacgtttccgatgttttcgaaggtgaatgtaaaaggggatcaaatccacccgctgttccgccacttgacgaacaaggcgaagggcatgcttggaacaaaagcggtcaaatggaatttcacaaaatttctcgtcgatcaaaccggagaaaacgttgtgcgcttttcaccgcaaaccaatccaaaggagatggaggagaccattcagaaatggctgggctgaatcaggaacaaacagaacagatccgcttgatgtccgaatgggtaaaagagaagctttctgccgaaggcacaggtcatgactggctgcataccgaaagggtgaggaacgtaagccttcagatcgcaaaagaagagggtgcagacctgtttatgaccgaagcttgcgcacttctccatgatgtgattgatgaaaagctgtccgatgagcaccgggttccgctgcaggagctgaaaaggcgcctgtccgaagaatggaaggtcgatccggaaacggttgacgggatttttgctatcatcacaagaatttcattcagagacagagagaaatataaagacgaacttctttcaaaagaaggaatggctgtccaggatgccgatcggcttgatgcgatcggcgccgtcgggatcgccagggctttgatgtatgcgggtgcaaagggccatctcctctatgggggcggcaatgcacctactgcagtcggccacttttacgagaagcttctccttttaaaagatttgatgaatacaaagacgggacggatgctcgcagaaaaaaggcataagctgatgctcgaattcctcggcgaactggaaaatgaatgcgccttctctagagaaagccgccttgatagatcagggctgggggttatggtagaataagaccggatctttaaacagagggggacaatgatgaaaattaaatcgatagaaccgacaccgagtccgaatacaatgaaggtgattttgaccgaggaactgccgggtggaaaaagcaataattataaaaaggatcatgcggaaggcgcacctcccgtcatccaggaagttttaaacatagacggagtaaaaggcgtctatcatgtggccgattttatcgctgtcgagcgcaatgcgagatttgattggaaagacatccttcctaaggtgcgcgctgcattcggaatggatgaagccgaagaggcggagggccgttccgaagaaaaagaatcgttcggcgaggttaaagttttcgtgcaaatgttcagcggaataccgatgcaggtgaaattgaccgacggcgagcgcgaggagcgcttcggccttccagaacgtttccaggaagcgatcttgaagcttaaaaccgcgtcttccaacgtcgtgctcgaacggtcttggaaagagcaaggcgtcagattcggcgatttttcagaaatcggccgcgaagtaacggaagagctggaggcggcttacgatgaagagcgcctgcggaagctgacggaatcagctgcatcaagcgatgctgaggctaaacgtacggctgtgcagcgaaagtcttaccgggtaacgcttgaaatgatggatgaggaagattggcaaaaacgctatgcgcatcttgaacaaatggatcctactgaagaggatattccagtactcgaaaaagcgctcaatgacccgaaaacatcgatcagaaggcttgctgtcgtttatttgggcatgatcgaaacgcctgcggtgcttccccttttatataaagcgctcgaagacaaaaccatcacggtcagaagaacggccggcgattgtctgtcagacatcggcaacccggaagcgattccggcgatgatcaaagcgctgaaggatccgagcaagcttgtgcgctggagagccgccatgtttctgtacgaagtcggcgatgaaagcgcgcttcccgctttaaaagaagctgaaaacgatccggaatttgaagtcagccttcagatcaaaatggcgatcgaacggatcgaatacggtgaagaagcaaaaggctccgtatggaagcaaatgacggaaagccgcaaaaaagacagctgacaaagacgctggaaacagcgtctttttttatgcttcaaaagcggcgatcgatccgggaattctgaaaaaagtcacgcgtcttgtaataaaatatcactttttctataaaaatatttcgaatattgttgaaaaacaagctgaaaatatatatagtagttagcaatcatatggaatgtggaggttctgattcatggggaatgatttacagatgaagatcaaaacagccgtcatcttgcggatcagtccggcaagcggttaacagacaatttttaaaactgaatattcagaatatatagaatgtaaatacgaagatgtttaggaggatcacgatgacaggtttacgcagtgacatgattacaaaagggatcgacagagcgccgcaccgcagtttgctgcgcgcggctggggtaaaagaagaggacttcggcaaaccgtttattgccgtttgcaactcatacatcgatatcgtaccgggtcatgtccatttgcaggagtttggaaaaatcgtcaaagaggcgatcagagaggccggcggtgttccgtttgaatttaatacaatcggggtcgacgacggaattgcgatggggcacatcggaatgaggtattctctcccgagccgcgaaatcatcgcagattcagtggaaacggttgtatcggcgcactggtttgacggaatggtatgtattccaaactgtgataaaatcacaccgggcatgatcatggcggcaatgcggatcaacattccgaccgtgtttgtcagcggggggccgatggaagcgggaagaacgagcgacggacgaaaaatctcgctttcctctgtatttgaaggcgttggcgcttatcaatcaggcaaaatcgatgagaaaggactcgaggagcttgaacagttcggctgtccgacttgcggatcatgctcgggcatgtttacggcgaactcgatgaactgtctttctgaagctcttggcatcgccatgccgggcaacggcaccattttggcgacatcgcccgaccgcagggaatttgccaaacagtcggcccgccagctgatggagctgatcaagtcggatatcaaaccgcgcgacatcgtgaccgaaaaagcgatcgacaacgcgttcgctttagacatggcgctcggcggatcaacgaatacgatccttcatacgcttgcgatcgccaatgaagcgggtgtagactattcgcttgaacggatcaatgaggtagcggcaagggttccgcatttatcgaagcttgcaccggcttccgatgtgtttattgaagatttgcatgaagcaggaggcgtatcggcagtcttaaacgagctgtcgaaaaaagaaggcgcgcttcacttggatacgctgactgtaacggggaaaacgcttggcgaaaatattgccggacgcgaagtgaaagattacgaggtcattcatccgatcgatcagccgttttcagagcaaggcggactcgccgtcctgttcggcaacctggctcctgacggtgcgatcattaaaacgggcggcgtccaagacgggattacccgccatgaaggacctgcggttgtctttgattcacaggaagaagcgcttgacggcatcatcaaccgtaaagtaaaagcgggagatgtcgtcatcatccgctatgaaggccctaaaggcggaccgggaatgcctgaaatgcttgcgccgacttcacagatcgtcggaatgggcctcggcccgaaagtcgccttgattaccgacggccgcttttcaggagcctcccgcggtctttcgatcggccacgtttcaccggaagcagccgaaggcggcccgcttgctttcgtagaaaacggcgaccatatcgttgtcgatatcgaaaagcggattttaaacatcgaaatctccgatgaggaatgggaaaaaagaaaagcaaactggcccggctttgaaccgaaagtgaaaacgggctatctcgccaggtattcaaagcttgtgacatctgccaataccggcggcattatgaaaatctagcggttttttcgcccggcgtttgaaattcagccccctctgtagtatccttgaaaacatcagtagtcaaggtttatagagggggctttttaatatgtcaacagcttatgaagaatacatgcgccagcttgttcttccgatgcgtcaggaattggtgcaggccggctttaaagagttaacgaccgcggaagaagtggagacattcatggaagacgcagaaggcacgactttcgtcgtcgtcaactcagtctgcggatgtgccgcagggctggcgcgaccggcagccgttcaggccgtctccggaagcgaaaaagggcctgacgagaccgttacagtttttgccggacaggatcgtgaagcaacggcaaaaatgagggaatacttcgaaggatatgaaccgtcttcaccttcaatggcactgctgaaaggcaaagaagtcgttcatttcattccgcgtgaacagattgaaggccgtgaaatgacggagattatgaaaaacattacggacgcttttgaaaaacattgctaaaatgccctttgaagggcattttttacggagaaaaacatgattgtcacaacaagctacagaccgactgaaagcacgattttaacagcagaaaaaatcagccggacgctcggcgcccgcttttccgagcggagaaaacggccgattcgccaaattcggcaaacagagcaggatgatgttctcgtggttggaaaagagcgctttgagctgtatcattcagaaggtgaaaagttctttttccatccgaactctgcgatgttccgggccaagcgtatgttaagaggcgaaccggacccttttgtcgaagctgcacaagttgaaccgggggacaaggtgctcgattgcacgctcggtcttggatcagacgcgatcattgcgagccttgccgcaggcgaacaaggcgaagtgcgcggaattgaaaaaagcccgcttctcgcttttcttgtcgaggcggggcttcaatcgtgggagaccggccttgacgttttggatcaggcgatgaaaaggattcgggttcattcaggcgacagcattgattacctgctggaacttgatgatgcttcagcagatatcgtctacttcgacccgatgtttgatgatggaatcaaagaatcagacggcatcgcccctttaagaaagtgggcgcattccgagtttacgcttgacggcgctttacatgaagcccttcgggtcgccagaaaaagagtggttctgaaagaccactggaagagtccgcgctttgaaaaatacggattttccgtaaaaaaacgcaaaacggccctgtttcattacggtgtcctcgaaaaatgaaaacccaaggtatataccttgggtttttttaatctgcgatttccatgacgataaaataagcgagggtaattaatgaagcggctataaaaagaccttcaaccatgaacgatcactcccaaatttggaattttcatctttgattgtaaacgttttatcgctaaaagaaaaggcgttttgtagatcagcatctccactttatgaatgactgaaaattcaacctatgatagaataagagaaaacgaaaaagcgatcagaagggaactaatcagtcatgaagatgtggatgagaaaagcgcttgtcgcattatttacaattgcaacgttcggccttgtatctcctcctgcggcattgatggcggacaagccgcaggagcatcagagcgtgaaagaatccggatatacggctgtttatcaaaagcaagaagagcccgagcttgatgaagacggcgaatccaaatcttcatttgacacctacagggatgaactgctcaatgaagctgaagatctatcattcgtaaaattcggcagcaggatatcgccggtcattgaagacgagtacagggaagaagtgcttccaaagatcgaggagatcatcgtcagccatctcatgacaatgcaggacaatgacgcttaccaggatcttgtcatttccaaaacgccgacggcggggaagtcggagagaatcttccacgtttacaatcggaaaacgggggaagatgtgctaaggttccatgtgcgcagggacaagccgccgcataaagggtactggtttaactttcattaccatactgccgaagacggctttcaaaaacatcacgatctcggaagcatttactgggaccgcaatacaccgcctaactggatgagtcactaaaggagattgatgcagatgaagaagtatacgatgaatgaaatggtgcacttaacgaaaaatatgctgaatgagcgcggggttgcgattgaggatatcgcgctgatcgtacaaaagctgcaggaaaaataccatcctgatctcccgcttgatgtatgcattgaaaatgtcgaaaaggtcttaaataagagggaaatcgttcatgccgttttaacggggatagcgcttgaccagctggccgagaaaaagctgttgcctgaaccgcttcaatatttggtcgaaacggacgaacccctttacgggatcgacgagattatccctctatctatcgtaaacgtctacggttcgatcggcttgacgaacttcggctatctggataaagaaaaattcggcatcattaaagaactggacgactgtccggacgatgaggttcatacgttccttgatgatatcgtcgcagctttggcggcagcggcggcaagccgaattgcccattcgcatcaggatcttgaggatgaagtgcaggaagagagaacagacggacagagcgttgcgaaaagccgctgaaagactcgcccgtccccgccatcaggcgggtttttttatgcggcatattttacgccttttctcgaaaaatgtcttgttttcgaaaggttaaacaagatacactacaaaaggatgaaaaaaatgaaacatcatgcggatatgtgccgtcatatgtaagaaaaccggaattgaacaaaacggggaatgagacaaatgcattcgggcggcctgatcagaatgaaaacctcgaagaaaggttcctctcatcacagctttaacctccatcttcatgcatcatgttcacagatgatcacacaaaaagatgagcatcatccggcattatttcgctacaaacatcataaggaggcattaaacaatgatctcattgattgctgcaatggacagaaaccgcctgatcggcaaagacaatgatttgccatggcatctgccgcaagatttgaagtattttaaagaggtgacgaaagggcacgccgtaatcatggggagaaagacgttcgagtccatcggcagacctttgccccaccgcgagaacatcatcgtcacatccaataaagaactggatatcccgaattgtcaggtgatgcactcggcagaggaagcggtgcggtttgcgaaaaacagaaacgaagaatgttttgtcatcggcggttcaacactatacacggagattctgccttttgcggacaagctgtatgtgacaaaaattgatgaaacctttgaaggggaccggtactttcctgaattcagcgaagctgagtgggaaatcgtttcgaggcggaaaggcctgaaagatgacaaaaatccttatgactacgaattcctcgtttatcaaagaaaaggatagaggagaggattttcatgttgcgctattgttttttatggatttattcggcctatatgctcatcaagcatatcaagcttctgcaggcgctgcagacacttgatccgcgcctttcgtatgccaatcagatggaagctgtctttgataagccgaaagcttttttgcgagggtgcatcggcttaaccggttcaaccgtttccatccatcagaacggaagatcgccggctggccccgtgctttatgtgcacccaaagctcggcctgtcagagcttgccgtgctgcttggacaccttgacaaaaccgcttcgttttttgctgatccgcgcgcctttcgttatccgctgatcagcggctggctcaataaaatggccgcggtcagaaaaagcgccgacaaggaagcatcgctagaagaagtggaagagattctccggaaaggccaaagctttattatgtctgaagatgacggactcgattacaaatctttatccaaaaggctcggcattccgatcgttgcagtcgaaacagccggtacggaagacatgaaaaaaggcacgttgttcaagaggctgagacctgttgatatcgatttgacgatccacccggcatacgtcatgactgaaaacaaacagcttcgggcataaaaaaaccaggctcccataatggaagcctggttttcgccgtttacgatacaaacggcacttttgccacgtagaaaagcacgcagaaaaacattgaggcgctgccgccgagcacgaaagtgtgccatatcgcatgatgatatggaatctttctccataaataaaagatggttccgacagaatacaagattccccctaaaagcagcagggcgaacccttctccggtcaaggccgtataaagcggcttgatcgcaatgatcgccatccagcccatcacaagatataccagtgtgctgacaacgataaaccgtttcacaaaaaagattttaaacacaaccccgccaatcgcaagcccccaaacgacagcaagcatcgtatagcctagcgcgcctttcaaaggtccgaggagcagcggtgtgtatgtccctgcaatcagtacgtagatggctgagtgatcgatgatctccagaatatcttttgttttttggtgctgaatgctgtgcagaagggtcgaacttaaatacaggaacagcatggaagcgccgaaaattgaaaagctgacaacatcaaccggacttccgtagcggatcgcaaatatcaccaaaaatacgatggcaggtattgacaggaggacgccgagtccatgggttattgcattagcaatttcttctttaatcgtgtacataccaagacaccctttctaatcttgaataatgtgatgctttaaagagcttaaaaagcggaggccttcaagcgtgatttttgtcccggctcttccgcggccctttgtaataaactctcttttttccaaataatccaatctgcttctcacttgctggggtgtaagctccgacttgccgcttttgctcagctcggacagaaccctgcggctggcaggctctcctttttcatttaattgcttgattgcatcgagcaaaaacgcaaactcctctttttccattaaggtaagtgatgccgaagccgtttttttgtccttaggcttcttttttttgatttgttctcttaacgagggcggtgtgtcgtaaagctgaatcgtttttccgtctgagacggttatcatataatccgtcatgtttttgagttctctgacgttcccctcaaactcatgctgctctaaagctttccaaacgaccggttcgacatatatgtcatgatccccgctttttaaaaaatgatgcacgagaagggggatgtcgcttcgccgttcactaagagagggaagcggaaggtcgagcacattgagcctgtagtacaggtccttgcggaattcgctgctatcaatccgttcaatgagaggcatgcttgaagaggtgatcaatcttttttgcatccctttttcaatggctgccaaaagcctgccctggagatgcaaggatagaccccacacttcgtcgagaaacaaggttccgggctcattcagctctgaaagaaaaaaatcttcagccgtttcatcttcatccagcgtgctgcagcttacatgtgtgaagggatcatccttgaaagatgatccggaatgaatggctttggcgaacagctctttgcctgtgcctgtttccccatgaatcagaatcggatgggaagatgctgcaaattgtatcgctctgtttttcgtttgcaaaaaggaatcgcattccccgatcagctcggagaaacctacggacggatatgtgtgtttaatcatggcggctctccttttggttctaattggttctattataacacccaattagaacaaataaagagttttttgaaaaaaagtgcatgtggcctgcacattaagaatcgaaaagaaccccgtatatattgagaaagtgtataatattctgtaaataacaaagaattgccctttaaattttgaatattcatgatataatggcgtattaaataaagctttatacagaaaggatcttatacatgaaaccgttgcttaaagaaaactctctcatccaagtcaaagacattttaaaagcccaccaaaatgtaaaagatgttgttattcatacccctctccaaaaaaatgagaggctgtccgagaggtacgattgcaacgtatatttaaaaagagaagacctgcaggttgtccgctcttttaaactgagaggcgcctattataaaatgaagcagctttcaaaagaaacgacgaaaaacggggtggtctgcgccagtgcaggaaaccatgcgcagggagtcgctttttcctgcaaacatctcggtattcacggaaagatttttatgccgtcgacgaccccgaggcaaaaaatttcccaagtcgaattgttcggcaaggaatacgtcgagatcatcctgacaggcgacacgtttgatgatgcttatcaaagcgcagtcgcctgctgcgaggaagaaaagcgcgcatttatccacccgtttgacgatcctgccgtcatggctggccagggtacggtcgcggtcgaaatcttaaacgatatcgaaacggaaccccattatttattcgcaagcgtaggcggagggggtctgctttcaggagtgggaacctatatgaaaaacgtgtccccggatacaaagctgatcgcggttgagcctaaaggcgcgccggctctttttgaatcaaacaaaaaaggcgaagtcgtcatccttgagaaaatcgataaatttgtcgatggagccgctgtgcagaaaatcggcgaagagacatttaaaacgcttgaaaccgttgtcgatgatattttgctcgttcctgaaggaaaggtgtgcaccgcgattcttgagctgtacaaccaatgcgcgattgtcgccgaacctgcgggagcgctgccgatcgccgctttagatctttacagggatgaaattaaagggaaaaatgtcgtatgcattgtgagcggaggaaacaacgatatcggcagaatgcaggaaatcaaagacagatcgatgatgtatgaaggactccagcattatttcatcgtgaacttcccgcaaagggcgggagctttgcgcgaatttttagatgaagtgctcgggccgaccgacgatatcacccggtttgaatatacgaagaaaaataataaaagcagcggccctgcgctcgtcggcatcgaattgaagcagcgcgaagattacgagccgctgatcgcaagaatggacaggaaaggcttccgctatgtcgaagtcaataaagatgaagggctctttcatttgctgatttaagaaatttttttgaaaacaaacctaaatcacagacaacggcttcagagattatgtataataaagaaaatatctcataaatgaggattgatagcttgttacttaaaagcctggagttcaaacgttcggatggacagaaggtgaaggtgacggaaatacctctgctgaaggaggacgacccgcatttttttatggccaatctgaggcttgaaatctttttaaagacgctctattgctcaaagcggaaaaaaaacgtctactcctttagggactacttaaagagagcattgaaatggcaggattacctggccatttatcaacatgatgaattgaagcataatgcataaatatttatggcattctttgccggcccatgaagagagcctaatccgctttaaaagagcggaagacggcatccgccggcaaagaatttttcatgcggatttggcctcactagaaaatacaccatttgaaccgacaggatgtgaagggaattgacaagcattaaaattgtaacggactcgaccgctgacttgagcgaagaactgctcagaaaatatcatatttccgttcttccgctctcgatatcgatcgacggcactgtatacagagacagattcgatattcagccggacgaatttattgagaaaatggagagcgccgcagaactcccgaaaagttcacagccgcctctaggcgcttttatcgaactgtatgaagagctgaccgctgacggaagcgaagtgatcagcatccatctctcaagcgaattgagcgggacataccagactgctgtaagcgcttcaaatatggtcggcgggaacattacggtgattgattccatgtatatttcaaaaggcctcggttttcaggtcgtgcgggccgccttgctggccgaagagggcatgacggccgaagcgattgtaaaagacttggagaacttgcgcgaccggacttccctctatgtgacaattgatcattttgacaacttgatcaaaggcggccgcatcgggaggggaaaagcgctgctcggctcattgctcaaggttaagccgatcgcgaggcttgaggacggaatctatacgcctgaaaaaaatgtccggagcagcagtcagcttatccgttatttaactggtcaatttgtttcagcggttaagggaaggacggtacaggcgatcggaatcgcccatgccgatgcgctcgatctcgcccatcggctgaaagactccttgcttgaacatatcccgggaatcgatattgatattgactacaccacaccgattatctcggttcataccggaaaaggagcgatcggttttaccttttacaccgattgaaaaaggggatggaaggattgaaaaacgtttttggcattttccttgcaggtattctcacagtgtttctttcgtcctgcggaactagcaagattgataatcctttgaactatgatgtacagtctttttcttttcaaaatcaagacgggaaagcggtgactcttgaaagtttaaaaggccaggtgtgggtggctgactttatatttacgaactgtgaaacgatctgtccgccgatgacttcacatatggctgaactgcaaaaacaaatggaagaggaaaacctgcaggcccgcatcgtctcattcagcgttgatcccgaaaatgatacgcctgaaaaattgaagaaatttgcggccaactacccgctcagttttcaaaattgggactttttaaccggatactcgcaggaagaaatcgaaaagtttgcgctgaaaagctttaaatcaatcgtgaaaaaacctgaagatgaggatcaggtgattcaccaatcgtcattttatctagtcgatcaaaacggcaaagtcgtcaaggattatgacggtgcaagaaatacgccgtacgatgaaatcatcgccgatattaagacgctggaaaaccgttgataaaaacgggcgacctgccgctaaagcctgtttcctgaacaccggaaaacaggcttttttttacatcggccaaatgattttcaaaagaatcaaaacatggtacacttttttttaggttatcaagaaggaaggggcatcattattgaacatacgttttattacagtcatgatggccctcgtctgtctgctttcagcctgtacggagtggaatgcgggtgttgaaaaaacatcggtctcccctaagcgcgatatcgtgattgcagcggtgggcgattctctgacagagggggtaggcgatcaagaaaagaaaggctatgtcggcatggtggccgatgagcttgaaagccggagcgatgtgaagtccgtaacggtcaaaaattatgccgttaaaggctcccggactgatcagctgcttgaaagattaaaagacaaagaagtacaagagggcctgaaagatgcagactacattttgtttacaatcgggggcaacgacctgatgaaagtcgtccgccaaaacttcgcgcacttaacgctcacacctttccgtgctgaacaaaaactgtttgaaaagcggttttcgaatattttagcggaaatcagagagcaaaacgccagcgctgaattgatttatgtcagcatgtataatccgtttaagtttacgctgtctgaactgcgggaagttgaccaagtcgtagacgaatggaatgaaggcgcggaaaaaaggctgaagaaggtctccaacacgaaaatggcggatatcgctgatatttttgaggaatacagcgatgaaaagaagattgcagaagacgagtttcatcctaatcaatacgggtattctttaatagcgaaacgcgtttacgaacaaattaaaaacgaagacctcccagcagaataaggtgaaaaaaatgaagaaatggaagagcttatttttaattttagcagcagtcaacgtcatgatacttgccgggattttcattctcatttccctgcccggcggacaaaaggagccgccgcgtccgactccgagcgaatatcaattgaacgtgacgagcacgaaagattcattggccgcattcatcaacacgtacttggaaaaggagtcttcgcctgatcttgactatcaaatcgaaatcgatgatgaattccatatcgtcggtgcgatccgcgccttttcctcgacagtcgatgcgagggtgtcctttcggccgacggtggaaaaaaacggagacgtggtccttgacgtgacgagattttcgatcggcaagttgaatgttccgatatcgatggtgctcaactacatggatcaattttatgaccttcctgattttgtacacgttcgttcagacgctaaagaaattcaagttcgtctgtcagagatgccgcttaaaaacggaatgtatgtgaaagcaaaagacattgatttagaaaaagatcaaatcgaatttgtttattacaagcctgcacaaacagattcataaatcgtgcagcggggtttacaggggtgaacatatggaacgtatctacacatatttcagcttgttgtctatgttgttttcactgtacttcggcggtctcgccgccttcagtttcgttgatgaaaacatggacaagatgtatttgaacatcgggtattgtgcgttgtttttaagcattatgatttttactcttgatgcaaaaaaacacaaaaaaactgaccatcacaatcaataattgccggcaaaatcctaaaacatgagatcgttttaggattttgttgtccctgcattcagcagactgtaaaagagacatcgggtctcttttttttcgctatgaaggcggagctttgacgggaaacggcgccgcttttatttcgagagaaggagagccgttgacgaaaccgaggccatacaacgttgtggattcgccggcatgaagcgtgatcctcggggccttcagcaggactgctgttgaaccggcccccctcagctcgacgtccattttctgtgaacgcaccgggatgtaccgggtaacagattgaaaggggacgccggaaaacaggacaggtccgttttgcactgcaaagtcaagagcgggagagtccggcgagagatggacgcatcgaatgctgcggctttccggatcagccgcaggctggtcatacattccgacgggaacgagctttgcggctgtgcctgtgacagcaaccgtgcagtaccggccgtggatcaggtgatactgtaccgtaagcaggggaccgttcgcccagcctcttcgaaaaacgtcgatttgaatacggccggcaggaaaccggacataagaagataaatctgtataggagacgtttcgaaaaacggatatcccgtttacgaaaacgtcgagattgtcggtatgaggagccgcgtggagcagtctgatcatcactgcttttccgctgtttcgaaaataaaagggcgcctcggcaggcagaacatcatagcggctcccctggaagccttccgccatataacgggcattatgaactgcagagaacatcttgtcacgcccctttgcatgctttctgacatcatatgaggctgcgaagccatcggtcacatgtgatcaagacgacagatgaaaaggagaaaacaatgaaaacggactttacatacggaaatgtatttaaacagctggtctatttttccggaccgatcattttagccaatcttttgcagatttcattccaattcgtcgacagcttgtgggtcggaaatctgctcggagcaaaagctcttggtgctgcggccgtctcaggaacggttttctttacggtgctgtcgttcgtattgggcgtcaacaatgcggcgctgacgattcttgcgcagcaaaaaggaaaaggggataaaaagggactggcatcatatgtaaacgcgtttgtcgttctgatgacggcgatgagcgtattgctcggggttatcggctattttttcacagagcctttgctctcgctacttcaaacgcctggcaatatgatggatttggccgtaagctatttgaggattcattttatcgggattatatttttattcggctataatttcatcagtacagtattaagagcggtcggcgacagtcaaacacctttgcgtttcgtcctgttggccgtcatcctgaacctgttcatggatccgctgtttatctcggtattcaacctcggaattgccggagcggcctatgcaaccgtcgtgtcccaagggattgcttttatttacggagtggtctatacggtgagaaagcagcttgttccattttcaaagccggcgcttccatcgctggcagagacgtccgtcattttgaagctcggagtgcctgccggcttgcaaatgatggtgatttcaggcggctcgatggcgattatgagcgttgtcaattcatttggagaaagcgtcgtgtcagggtttggcgcggtacagcggcttgacagcctgctgattctcccagcgatggccatcggcacggctgtcaacagtatggctggccaaaccttcggaagcggcgacatggagcgtacgaaaaaaatcgccaactacggcgtcatttatgtcctgctgtttatggctgccgtcagcaccgcgatatttctgacaggctatcacgcggtcaggctgtttatatcggaagccgattcagccgcattcggggaagagtatttaaaaacgattgcttttttctatccgtttatcggaattaactttgtgttgaacggtgttgtaagggcagccggagcgatgtttcaaattttggtgctgaacgtgatttctttttgggctttgcgctatccgtttacatatctattttcaaagtggcttggcgagaacggcatagcgctgggcatcggaatgagctttatgctgagcagcctgaccgcctttttatattaccgctacgggaagtggaagcacctcgttctatttgaaaaatgaaagcaagctcctccggcaagcctcggaaaccagatcccgccgggcgtctgaagaaaggaacaaaaatgcttttaacgtcttaataattgacgatatatacaatataaaatgagtttggcgctgggggcttgtcatgtttttaatcgatttatttttgaatttgtgcattttaattacttcgctctttatttacactcagctaaagtggaatattttttcccgaaaagctacaaacaaacaacttgattggattgacggcattcttggcggggtgctcggaaatgtgcttatgttcttttcgatccaggcaaccgatgagacgatcgtcgacttgcgttatgtccccgtcatgattttgtttttatttacgggcgcctttccggcctttatctgttctctgctgattataggaggaaggtttgtttacgggacgaatacatcctcgattgcagcgcttataggtatgatcgtgatattcgcaggatattatctcattcttcggatcatggataaagacgccggcacttatcgaaagacatttgcattagttatttttgccaatgtggcgatttcaattgtgatcttgatgatccttcatgatttcttcttaatgaaaatgttattgacgtggttctggattttatctactatcggcggctttacgtcagtatacatcgtctcatatttaagaaaatctcattttctgttaaaaaagtatgaagaggaatcgtcgattgattatttaacgggattgaataatgtccggcaatttgatgcgatatggaatgctcatatttcaaacgcaaaagagaagaacgagaaactgtctttgcttttgatcgatatcgattatttcaaaacgattaatgatacgtacggacattcaaatggagatgcgattttaaaagaattaggaacgattttaaaaaagtctgcccgatcggaagatatcgtatcaagaaacggcggagaagagttttcggtcatattgccgaactgttcccattcgcaggctgcagagattgctgagagggtgcgcaaggaagtggagacacacacttttttcatttctcattcaaaaaagattcatattacggtttcgattggagttgcggcatttccggaggtgattcacagtacgggagagctgattgaaaaagccgatcaatgtttgtacagggctaaacaccttgggagaaacagagtgtgcacctccgtttgaactcgcattcagctgaatgaaaaaggatagatgaaacgaggttcatctatcctgtcttttttatgttcgtttatcgaattcagcaagtttgataaaagtcttctcatcctcaattaatccgcacgcgccgcactgcacttttatggcagggccgctgtacggcaggtgaaaaggcgaaagctcgtcatctgaatacgtttccactatttcccctgttgccggatcaatcttaacggatgtcggggactgttcgattaagttgaaccgtgttcggtttgttttgcagtttggacaaaggtaaggagcagtcataggtcagtacacctcttttttattttaaggtgcacggattcaggccaatttatgtaaagtccgggttagcgctgttcccgttttttgtccaatttgctgaacagttcaatcagcgttttcagctcttcatcactgtagctgctgaaccgcttgaaataatattccgttttcttttcttcgaaatatctgataatttcttttcctgcgtctgtcagatggattttgatgatccgtctgtcttcttttgaccggactctcgtgatccagcctttttcaaccaatgcatcggttacagctgtgatatggcttgctgaaacgcctaaaatcgttgcaaactccgtgactttctttggaccttgctcgctcagcaggcggagaatcatgaattcattgcgggacatctctttttcgagcagctcatttatctcatcacgtatctgtttaaatactgtgcgaagcagtgcttccatatcatacatcatttgttctctaactttcaaaatttcgcccctccatataattagcaaatttcagctttgtttaaaaaggaatgaccgaatcagcatgattatcatttttcatgaacatgatatcactatgataccataatttttgcttttcaagtgtatgtttcagaagatttttagttcatttgaccatcaattgaacaacggtctatggcaattatatatgaatacagctgtttcttagaatatgccgatggcaatgacatattattgtcataattttctttttagccagcggctgatgaatgtgttaaaagttgtttcctgtgagcgggagcgggcttaaaaatgagcatgctgtgatataatggttcccaacaagtgttgaagagaaggaggcagaacagatggctgaaaaacgcgaactcgccacatttgccggaggctgcttttggtgtatggtcaagccttttgacgaacagccgggcattctaaaagtcgaatccggctataccggcggccatacggaaaatccgacctatgaagaggtgtgcagcaatacaacgggacatagggaagcggtgcaaatcacatttgatcccgatgtctttccatacgaaaaactgctggaactctactggcagcaaatcgatcccactgacagcggaggacaattcgcagaccgcggagagtcttaccggacagcgattttttaccataatgacaagcagcggaaactcgctgaagaatcgaagaaaaagctcggagaaagcggcatctttaaagatccaatcgcgaccgacattctggaggccgggccattttatccggctgaggagtatcaccaggactatcataaaaagcaccctgaacgctacacacagtatcggatcggaagcggaagggaaggatttttacaacagcattgggggcgaaagcatgacgaacaataaagaagaacggctgaaacagctgacccggatgcaatatgaagtaacgcagaaaaacgggacggagcctccattccaaaacgagtactgggacctgcatgaagacgggatctatgtcgatatcgtttcagggaagccgctgttttcatcgcttgacaaatttgacgcacactgcggctggccaagcttcacaaaaccggtcgatgccggagaaatcgaagaaaagctggacacttcacacggcatgattcggactgaggtgagaagcaagtctgccgattcccatcttggacacgtgtttccggacggacccggaccggacggcctgcgctattgcatcaattcagccgccctccggtttgtgccgaaggacgaccttgagaaagaaggatacggcgaatatgtcaaactgtttgaacgcaagaaatccggagaggaaagctgaggagagcagcatgcaagatgatccttttttcaaagggtcatctttttttagaggattttctgctctgaaagcgaaaaaacattacaatagatcatcttgagaaaagaggcagccgttgtgacatccatttcaaacacagaagaccgttatttaatgctgacatgcagcaaaaaaattgaatcccattatcatatatacacagatgaggagatcccgcagatgttttcctctcattttctgcagctgcaggacgattttccgctgacagagctgtactccctgctcgttcggacacccgaaattttaaaacgaaattatgttcatgtgaaaagctcttataagcgggatctgccttttacgatgaaaaagtcgctctttgatcttggctatattcttgatgaagaattgttttattccatcaggcttgcagattggaaaggagattcccctggtgtacgggcagagtgggggacggagaaatcgctcattgacggctgccgcatgatgcaggcttatgatacattgtctatcaatgaagcgtttgcgaaggaaaagctgctgcgcaagtatcctttttatgaggaaggcatcattcagctgtgtgtctgctactcggaagaaggcgaaccgattggatgtgctgagctttatctcgatcacgacgaaaacgttgctaaaatcgaagaagtcgccattttggagccataccagcggaaaggctatggatcgggccttatcaagcagatgctcaccgccgccaaacaatcgggcatggaatcgtgctatcttgtaacttcgggaagcgatcaggtgaaaacgttttatgaaaagctgggctttcagcagaaggaaaagctcacgacaatatttaaatatttgttcgtataaagtaggcaggtgcacataccaattgggacttggcctgcataggctggggtgtagactttatacgaaaggatgataagcctgtgcattactcccattattgctgtcctactggaggatacggctacgggtttcacggaagaaacacatttgtactcatcgttgtcctctttattttgctcatcattgtcggtgcggctttcatttgctagctaaaagcccgacgcccggcgcttgacatgctcacaaagccttccatccggaaggttttttttgtttttgttgtaaaattttgcattcgtatgtaatatggtcatgaggtgaaaatatcggacaaacgggggagaaactttgaaatatgcttgggtcataaaaggggactttttcagactgtggtctggaacttttttatcgctctttagttcggttcttttctattattcattggtatggtggtccttatctgaaaccgggagcgccctttcgggaagcgtcgtgatcggcatcgggctgactgtctcgattttggtatcgccgtttacaggctggctgtccgacaggtttcacaggggaaagctcattgcggcttcggatatgatcatttcagctgtatttttaatgatcggatttttggcgctgtcaggcatgaattcggtttttttgctggccgcttcaagggtgatcgtatcggcatgtttgaccgcaatcgaacccgctgcaagatcgctcttgccagatacattgagaaaagaacaaattgaaaaaggaatcgcatttcaagaagtgctcacacagctcatccaagtgattgttccgcttgtcacaggggttctgttttcctttttgcattttggctggttatgggtgctgtgcggaagcctttccttcttgtcgatctttttggagtggagaatcaaagatgaaaggggcagccaaaagcgtattccttttaccaataaacaattgttcagcggttttacaagcttgtatcaaaataagccgctcaagtatttgttgtatgggacgagcatacagcagcttgtattcagcggttttccgatatatatcgtcatttggacttcgctgcttttaaaagatcaggcctggctgggcggcgctttccaatcattttgggcgtgcgggacgctgtgtgcggcgcttttcttgtcctttatcgcaaaaccggagcacgcaaaagcagctgtgcctgctttaatgctgattttcggcctgcttttgtctcctctcggctggattgatcatgtcgtgctgggcgctgtgaatttgatcgtcatcggaatgatcagcggcgtcgtcaacatctatattgaaggttacttgcaaagggtaacggaaggtgaaaatagaggcagatcgctgggcgctttctttgcggtcaacagctcttttatgccgctcggctatgctgccgcagggatgttgtcggaggccgtcagtccggaatatttattcctcatcgtcgcactgcccgcgccgttcgctgcgttttcaatgatgagatcattttatttatgggaaaaacagacgaaggaaacggtcgctttgcaggatgaaacgtcaatataaaccagcgcgccctgaaaaaaaggaaggacatgtccttcctttttttgtttgcgaaaacggcgtttgctccgaaatcaaccatttccgcgtgaaaagagaatgccgccttttcccgactcatataatgtaaagaaaaacctctcattggggaaggggggatgttttcatgtcgtttttgattaagccggatctgcacgcaagctatccggtcgttcagtatgcaaaaggaagctggattgtcgaccattccggaaagcgttaccttgacggttgttcgggggctgttacctgcaatctcgggcacggtgtccaagaagtgattgagcctctcaaagagcagcttgatgctgtttcattcgtctaccgttcgcagtttacaagtgagccggccgaacagcttgccgaactcctggctgaatggctgccgggtgatctgaattggtctttctttgtcaacagcggatcggaagcagttgaaaccgccatgaaaatcgccgttcaatactggcaggaaaaaggacaaaacgacaaaacgattttcctttcaagatggaacagctatcacggaattacaaatggagccctgtcgctgtcgggattttatgagcgccgctacaggtttacgcacatgctgcacaagtatcccgccgcttcagcgccaaactgctacagatgccggctttctcatcctgaatgccaggaagcgtgcgtgaaagaaatcgagctcgccgttaaaaggatcggaaagcaattcatcgcgggcttcgttgccgaacccgttattggggctgctggagcagctattacggcacctgctggctattataaaaaagtaaaagaaatatgcgaagataatgaaattctctttatcgcggatgaagtcatgagcgggatcggccgaaccggccggatgctggcgattgaacattggggtgtgactccggatattgccgtactcggcaaggggctgagcgcaggctattcaccgattgccgcagcggtcatgtccgacggcatgatggaaacggtcaaaaacggctcaggggccatcatgagcgggcatacgtacagcgcaaaccccttttcagcccgtgctgcgctcgccgttctccgctacatcctgaagcacgatcttgtcaaacaagccgagataaaaggggaaaagctgaaaagaatgctgaaagaagttatgaaacagtcgagcattattggcgacgttaggggcaagggacttcttctcgggattgaatttgtcgccgatcaaaaaagcaaaaagacatttccttcttcaatgccggtgtcggctctcgtcatttccgaagcgaaaaaaagaggactgcttctttatccgtcccaggcgggtattgacggcggcgggggagatgcggtcatcattgcgccgcctcttacgatatcggacaaagaaatggaagagctcattgaaatatttaaacatgccgtatatgagattgaaaaacaagcggaaaaggtgatgcgcgaaagatgacgatgccgaacaaacgtattgctgttgaagatgccattgccgatttgaaagacgaagcgaccgtcatgtttggcggatttgggggagtcggttcaccgccttctttcatccgggcgattttgaaaaaaggcgtaaaaaatttaacggtcatatgcaatgatgcaggatttcccggcatcgggatcggcccattaatcgtcaataaccgcgtaaggcggctgatcgcttctcatatcggttcaaatcccgttgcgggaaaacaaatgaccgacggttttctcgccgttgaattttctccgcaaggtacgctggccgaacgaattcgtgcgggcggcacaggtcttggcggcattttgaccgatatcgggatcgataatgacatggtgcgccaaggaaagaatatcgtttcattaaacggacgcgcataccttgccgaggaagccttgagtgcggaatacgctttcatttatggaaaaaccgccgatgaattcggcaatatcatctacgacaaaacggctcgcaacatgaacccgcttatggcgatggctgctgatcggacatttgccgaggtcgagcggatcgttcccattggagagctcgatgaagaagaaattgtaacacccggtgtttttgtcgaaggtgtagctgaaacggaaggggtgaactggaaatgggtttgggagtcatagagcgggagagaatcgcgaaacgggcggcccgcgaaatcaaaagcggaatgattgtcaatctgggcattggcattccgtctttagttcccaactttttagacccgggcacttccgtaatgatccaatctgaaaacgggcttctcggcatcggcggatcgcctgaaaaaggaaaggaagatgagaatctttgcaatgcggcaggctggcctgtcaccgtagtaaaaggcgcttcttattttgattcagctctgtcgttcggcatgatcagaaagggtgcgattgatgtcaccattcttggttctctgcaggtcagccagtcaggagatctggccaactggatcgtcccaggcaaaaaggttcctggaatgggaggggcgatggagcttgcccaaaaggcgaaaaaagtcattgtcgtgatgagccataccgataaaaacggtgcacccaaacttgtcgctgactgtactctgccgctgacagcaaaaggctgcgtcgacatggtaattacagaaaaagccgtgatcaccattgacagcggcggttttgtattacaagagctgatgaatgaagaggatcttgatgatgtgctgcggctgacggagggaaagatccggatcgacgggccgctttcgtaagaggaggaattggatggagaacatagagagaaaagtgtgcgattggatcgattcgcatgagcaaaaagcgattcgccttttgaaaaaactcgtcggagaaaaaagcacgatgggccgagaatttaacgcccaggccgtcgtcctggagaaattgaggcaattcgaagctgaaatcgatgtctgggagccaagcataaagcagttggaacagcatccgctgtttaaatcagacagaacaagctttaaagaaagcccgaatattgcggctgttaaaaaaggaaagggcggcgggaaatcgctgatcttaaacggacacatcgatgtcgtgcctgaaggaaacagaaaagactgggagacggagccttttcagccggttgtgaagcaggggcggatatacggccgaggcacaactgacatgaaaggcggcaataccgctcttttaatcgcgatggaagcgctggagcaatgcggggttcaactaaaaggagaccttatttttcaaagtgtcgtagacgaggagtgtggcggagccgggacgcttgcggccgtaatgaggggctacaaagcggacggcgctttgattcccgagccgacaaatatgaaaatgtttattaaacagcagggctcaatgtggttcagaatcacggtcaaagggctttctgcgcacggcggcacaagatatgaaggcgtcagcgccatcgaaaaaagcatgcttgtcattcaatcgctccgccagcttgaacaggtcaggaataagagaataacagattctttgtatgacaatatcccgattccggtcccgatcaacatcggcacgatcaacggaggcgcctggccttcgtcggttgccgacacggtgacactggaaggaaggtgcggaatcgctccgaacgaatcccctgaagccgtccagtccgagcttgaaaactggctcaacgatcttcagtaccatgatgaatggtttaagcactatcctgttgatatagaatggttcggcgccatgtggcttcctaacgatttggctgaagaccatgaactgacgaaagtgctgaaatccgcctatcaaaccatcacggcagaggctccgctcatcgaagcttccccgtgggcgacagacggcggaatattgtcgcacgccggaggcacccctgtcatcgtcttcgggccgggagaaacgaaaatggcccaccaggcaaacgaatacattgaaaaagacgccctgatccagtcagccaagatcatcagcctgtttattatgaattggtgtgattatgaaaggtgaaaagatcagccgtttcggaggttaaatcatggtgaaaaaatggagcaatgacagctgcacgcttgaagcggatgtcgacttgttcagcaaaaggatcagaattgtcaattatgaaggcaatgtgtgttcattttttcccgacatactgaaagaagcaaaaaaacatgatatagggaaaattatcattttcaccaaaacgactgacagagacgcattgcttgagcggacgtttgaaccggaagggaaaatcgacggatactttaacgggcatgatgctgacgtgttcgtaaaatatgtaaaagaagacaggcgaaaaaccgctgactggcttatgcaggatcaaatgctggcagagctgttcagcacaccccgcatcgccgagatccaaaacgcttcctttaaaatcaggcgggccgtctctgttgatgcgcctgttctcgccgacctctacaacagcgtctttcctgtatatcccgcacctgtttcagattcggcatatctcaaggaagcgatgggaaagggggctgtttactacctcgcttttgacggcgaaaaagtcattgcatcagcaggcgcagacgttaatcccgctttggggaatgcggaaataaccgactgcgccgtcctgccggaatacaggggcttttcattgacgaggcggttgattgccgagcttgaaaccgacttgaagcaatcgggcatcttttgcgttttttcaatcgcaagagcggcttctttcggaatgaacgccagtctttatcatttatcatactcatacaggggccggcttttgaacaactgcctcatttatagaagcattgagaatatgaacatctggtgcaaaaatttaagccggtcttaaaaagtggtcttccgcgggttttacatttgaagagacacttttcatgccggtcacataacctgaaaagtatagggaaaatgctgatagggggatggaagatggaaaacggtctgtttaagccgaaaaggcactggaaggatattgagctttggaaagatgttcccgaggaaaaatggaacgactggatatggcagctgaccaacaccgtcagaacgcttgaagatttgaaaaaagtcgtcaatcttacgaaagaggaagaagaaggggtgcgaatctccacaaagacgatccctttaaatatcacgccgtattacgcctcactgatgaatccggatgatccgcgctgtccgatcagaatgcagtcggtgccgctcgcagaagaaatgcacaaaacaaaatacgaccttgaagatccccttcatgaggatgaagattcgcctgtccccggcttaacccaccgctatccggaccgggttttgtttctcgtcactaatcaatgctcgatgtattgcagatactgtacaaggcggcgtttttccgggcaaatcggcatgggcgtgccgaaaaagcagctcgatcaggcgatcggctatattcgggatacgcctgatgtcagggatgtgctgatatcaggcggggacggcctcctcattaacgaccagatccttgaatatattttgaaaaacctccgcgccattccgcacgtggaaatcattcggatcggcacaagggccccagtcgtcttcccgcagcggattaccgacaagctatgcagcattttgaaaaagtatcatcccgtctggctgaatacgcatttcaacacgagcattgaaatcacgaaggaagcgaaggaagcctgtgagaagctggtcaatgccggggtgccggtcggcaatcaagccgttattttggcaggcattaatgacagcgtttccattatgaaaaagctgatgcatgatttggtgaaaatcagagtccgtccgtattatatttatcaatgcgacttgtctgaaggaatcggccatttccgagcgcctgtatcaaaggggcttgaaatcattgaaggcttgcgcggccacacgagcggctatgcagtgccgacctttgtcgttgacgcgccgggcggaggcgggaaaatcgccatccagccgaattacttgatttcgcaaagccccgataaagtcgtgctccgcaattttgaaggcgtcattacgtcgtatcctgagcctgaaaactatgttccggggagagcggacgactattttgccgaaatcttccctgatgtgatgaaggaaaaagaggagatcggcatatcggcaatctatgcggatcaagctctttcatacacaccggacggcttaaaacggctcgagagaagagaaagctattccaagaggcctgatcatgaaacattgaaaagccgccgggcaaagcgcgatgaattgaaagaaaagaaattccttgcccagcaaaagaaagaaggcgaagctgaggggcatgcgcaatgaagaagtgtgaatggtgcaatgaagaaaaagccgcggcagcccgcacggcggtatattgggagcttcccgacgggacgaaagcgattgaaatcaccgacacacctgcggtggaatgcgaagggtgcgggatggtctatcaggaggacagtgtcacctgggaaattgaaaatcagctgctcttgattgatacaaaaaaactgccatcgtccgtttcatatgatgcgctgatgaaaacagagcgcatactgaagcggaattactttgacttttcctcatgaagccggcttttgccggtttttttgcgtgtttcaacgggttttttgtttgtattttttcagacggcctgtataatagaacatcaaaagaggacaggaggggagaccgtgaagtctttttaccattatttaatgaaataccgccatccgaaaccgaaggacgcgatcagcgaattcgcgaaccatgcttaccttgatcacggatttcccaaggcatcaactcattacgatgaaatcagctcttaccttgagcttaatggggattatttatcgtcaatgacgacatttgatgaggcttgggaacgatatatttcggaaacaaagcgataaaaaaaccgcagttgttcagaactgcggtttttttgcgttcgttcgagccgactgggcttttcggaaaactcatcgggccttgtagccttagcccatgcgaattgacagcactcagcatacgataagcgtaacacggaagcttcaaggcaagggggaatccaaatgaagtcaaacgcgcctaaattcaaagtcggggatgtggtcgtcgtcgtgatgtacgggacggtcggaacgattacaaaagttcataaaatcgataagcattttttgtatgaagtcaatcataatgaagtgctttatttcgagacttctcttcaactttacaaagattatgacggggtcattgtcgatacggaaaagcttgacatcgaatatgaatttttaatcggagatgtcgtctatgtaaaagattacggcaaagaattgtttaaaatcaccgggcacagaacggaaatttggagatatgtggaggatggctgggaagatatcatttacgagctgacccgtttgaaagacggagaatggcttgaaactgaagaagaagatttaacgctcgtgcttagaacctacgaaatggaccagttcgtccatcagcttctgtttgttcattatgtcggcgaagccggacaagagcttgatgaaccgatatctgaaaaagtgtttttgccattttctggtgattccgaggagcaggatcatgagcgcaatatggcagttactgtcgtggatgaactgcttgatatctacaatgactataaagtattgtatgaaatgtttcaggatgcggaatataaagatatgatggagtttgtgttaagcagcctgaaagaatatttcaaatgataaacaacaaatataagaaataaggaaaacagccgaacacaataagagcgaacatggctttcaagaccttccccaataccaggtcaaacccttctccgtcaagtgcttcaagcgttttttggatcattttcttttccccttccggcttttgtcttgttacgacatgtatatgaaagaggacaaacattatgacaaaccggttataaaaccgaatgccagctcatacatcagaataaggaggcgatcacaatgaaagaaattgaactgatgatagatacagaagaaatcgctgattttttttatctagagctgacaagaagaggctacataccgaacgaggacgaactgttcgaaattgccgatatcacctttgattatctgattgcaaaatgtatgatagatgagcatatagaggattgaaaatggagaccggggcggacctgctccggtttttcctatattatttgcccggcaggggagccgggtgtaaaatgtttaaaaacaatgtcaaggaggcactgacttttctaatgtataaagcactattttcagcagctgtctttgtcatcatggccattcttatccgcatcccggcggttcaatcatttgatgtgagcgtgatacaggctctcgagtctgtcagacatccggttctcacagcggtttttaaagcgctgacagagctggggtcaagcggcttcatgctgccgctgatgcttgctttaaccctggttctcgccgtctataaaaaagcagcggcatcactgtatctttatttgctgttttttgttgaaagaacggccaatgaagccttaaaaggctggattgccagagagcggcccgcgataaacccgctcgtgcacgaaccgtcatacagctttccgagcggccattcgatgaatgcggcgagcatgtatccgtttatcgcatttctccttttgctctgcattcctttttttcaaaaacacagtcgcgcggtttacgtgtggacgggccttctcgtcggactcatcggaatcagccgcatgtatctcggcgttcattacatgactgatgttatctcaggtttttcgctcggtctcgcgctgtttttcatcttcaaaaaaattggcgaaaagtacccgcttgttcgacaaaagtagtcaaagggattgagccccgaagcgccaattttataaaaaaaggagggatctgtattgccgttaatgtttcaactgtttaaaaaaaagctgataccttatgatgtgacgatttttcaaacgccttgctttggtgaagataagggatacgagatggtttacagaacggaaataaacggcagaacccatgaagatgtgctggaacggacgttttccactttcaatgtttatgacacggtgccgaatgattataaggcgagatttcttgcaactggcgacatcgttttaatcgatgaaggaagaaagggaaaaacctattataaactgctgtctacggggtggagcaaaatcaaccgcattttgctgcagtcttcgtaagaagtgaaaaactgcggaagcgctgtccgcagtttttttatgttgtattttttctttttctggcgctgtattccttttcatgcgcatcctctgccgcgatgacgtcctttgtcgggatgtggttgttttttttcaatccggtgactctgtttcgctgttttttgcccatcatttatgacctccttcctaaaaaataggatgactaaacgccccgttatttatccaggagaaagctgtctttaatctgtcatactaatcgcggccggatagacatacggctgctccggctcgctgatctccttccatcgcttcgtgcggatgatcgggatgacagagccgttataagacgctttgccaagcgttccttccaattcaatccatgtgtcaggctgcaattgctcagcaccgttccattcggcgagaaatccgatcaggctggcgtctgcgatgcagtgcgtgatcataaatcgggacagcacgagctggcgtgcgctcagccccgcttccttatggacgaagcctttgaccgtgatctcctttccaatatagtgatcaagattgcttgtcacttcatcataatagtctgcaaacatgtcgtcattcatgacaatccgcttttcctgtttaaactgatccatcttcctgtcatacgccgacttcgtcatcgctgaatcggcgagtccttgctgaatctccggtgtcatgacatgttccttttcgccttcagtttgaggggcgatctccgttttggtgagcatcgtccctttattggcggcgacagacgaattcagtacagccggggaaagggtgaatccggtgatgaggggaagagcgatgacggcataatgcatcagcctgatgaaaaagggctttgactcgccatgatcatgcccgcagccgcaatccccagcgcggtcatccttcaccgtccagatcctggtcagctgaatgatgaacagaaacgcgaacacacctgcggcgatgaggctggtgtaatcgtatttaggattaatcagcttatcaatttcccctgtgtaatggagcttgaaaataaagacggaaaaggcagccagcacaagtgcgcgcaaaaattgccgaagctgaaaaaccattggtaaaacctcctttctacagcaaactgacaactttgatacaaacaaagacaacaacggtgatcaggacagacaaacaaatgacgaacttcggcttaaacgcatgcagcatcatgaccgtattttttaagtcgagcatcggcccgtaaacgagaaaagcaaggatggatgaggaaggaaacaaattggtgaaggaagcgccgataaatgcatccgcttcagagcacagcgataaaaagtaagccagccccatcatgaccaatgccgagtcaagcatgccccctccgaacacaaacagcgattttaacgggaggtatgtttgcacaagcgctgcaactaaagcgccgataatcagaaacctccccatatcaaagaattcgtcaacagcatgtttcagcatatcaaagagcttttccgaaaaaggggatggtctgccggaatgggcgcagtgtgcagctgtctgccggctttccgttttcagctggctcgagcggaacatcatgctgatcgcaaaagcgatgatgaccgctgcggcaaaaccgacggcaacccttaaaacggccattcgcaagtcattgccaaaagccatataagtggataagacgacaatcggattgatcagcggacctgtcaacagaaagccgacgcctgcatagatgggaacgccttttgacacgagtcttctcacgatcgggacaatcccgcattcgcaagccggaaaacaagcgccgagtaaacagctgacaatcactcctgaaaacctgtttttcggaaaaagggagcgaatatgctcttcagtcacaaagatctggatgaaaccggcgattaatactccgattaacacaaagggaagggcttcgattaaaatgctgatgaaaatcgtattcagctgcagaacggaagccggaatctggaaggggaggcctgaggcgagcgacccgccggctgacacaaggcatatcagaacactgatgacaacaagcccggtaaagtcgattaaataactgttaagtgaacgaaacatcgcttttcctccatcctgaaatagctaatcgtaatgattcttttttaaaggtatgcctgtccttttttaaacatgacaagaaaaagaatgatgccgaatcggagcagggctttattttctttttccgcgatgttggtttataatacatatgcgagtggatgttgcaatcatcatcaccaatcagctttaaaaaggcaggaggaataatcatgagcgtacatattggcgcagaaaaaggacaaattgcagaaacggtgctgcttccaggagacccgctgcgcgcaaaatatatcgctgatacatatttggaaaacgttgaatgttataacgaagtacggggaatgtacgggtttaccggcacttataaaggaaagcgcgtttccgttcaggggacgggcatgggtgtgccgtctatttcaatttatgtcaatgaactgatcagaagctatgatgtgaaaaacctgatccgcgtcggatcgtgcggtgcgatcagaaaagacgtcaatgtaagagatgtcattcttgcgatgacttcatcaactgattcacaaatcaacagagtggcattcggctcgatcgactttgcgccctgcgcggacttcggcctgctaaaagctgcttatgacgctgcaagtgagcggaacatcccggttacggcagggaatgtgtttacggcggatcaattctataacgacgacagccaaattgagaagcttgccaaacacggagtgcttgcggtcgagatggaaacgacggcgctttatacattggctgcgaaattcggccgaaaagccctctccattttaacggtcagcgatcacgtcattaccggcgaggaaacaacggcagaagaaagacagacgacctttaatgatatgattctgctggctctggatactgctttgtaaaagcatacatgcactgaaaaaggatggattcgaatgaacggaaagtacaaatacgtgacgattgcttcattgctgagtgcagcggtcctgcttggcacaggatgtaccatgaccgaacagaagcaaaatgacacggctaaaacacagaatactgcaaatgcaagcaaggatgcaaaagaccaaaagtcagacagcagcctggaagatcaggacttcatactcgagagcaagtactttaatcaaataaaagatgtagacgggctgccgacgattcaaaatccggaaaacataatggcgcttgtaaataaagaatacgcgcttcccggcaactatgcaccgagcgacctgacagtgcctgatgtcgcgttttcttttaccgaggatatcgacaagcgttatatcagaaaagaagccgccaaagcgcttgaagagatgttcagcgccgctaagaaagaaggctatgaactcgttgcagtgtccggctacagatcctatgacagacaaaaagcgatctataacaacgaagtcagccaaaagggagaagaaaaggcgaaagaagctgtggcatatccgggccaaagcgagcatcagacaggacttgcgatggatatttccagcaaaagcaacggcttcgccttatcagaggaattcggcaatacgaaagacggacaatgggtcgagaagaacgcctacaaatacggctatatcatccgctatccgaaaaataaagaagacatcacgaaatataagtatgaaccttggcacctgcgctatgtaggaaaaaaagcggctaaagccatccaagaacacgacttgacgcttgaagagtattttaaacaggtgaaaaagatataaaaatgaaagggccgatatcaatcggccttttcatattaccaaaaaaacaagcctgcaagagccacaccggcaattagaccgaggccaagtccgtatacagggccccaaccccaccagccgccgtaatatccgtaggcgaacccgcggcctccccgtctgatcatcggggcaatatatactttgcttggtgaaacacggacgattcttccgacatggacgcggcctcctttgtcggtgattctcgcaactctgccaatattttggtggcaaaacctataatatcggtccacttgaatgctccttccatcatctaatctattcctagtcagcttatgacggatttaatagaaaaggttggacgaaagaaggaggacaaatgatgatttatagatgtgatataaaaataatatgatcgagagagtcccggtatttttccaggtaatgcaggtgtttttccatcgtttcatagtctttgtcggaaattgcaggcgacagatccatttcaacggcgtcatccgggtctcctgcatcttccaatacgacaggaatgatgtcaatctttgaaaatccttcttctcgaaggacattgacccactcatcctcgtcatataatgcggtgaatccgtaaaattccgtgatttctttttttgcttcgtctgtcagtgcgtttccttccttaaggcagacttcgatcgcgaccagcatccctccgggttttaaaatccgccggatttcctgtaaagcagaccggatatttgtgaagctcagcacagattcagttaatacacaggcaaagctttcagactgaaacggcatttcctcaagtggagagcggacagccggaatggaaagctgttcttttttaaaacgctgtcgggctttatcgatcatgaccgggtcggcatcaagggcagtgacaggaaacagaagctgacccaaataagcggcggtctggccggttccgcagcctgcatcaagaatcggctgctcagggtcgatgccggctttggcgagcactgcctttgacagggacatcccgccgggatgagcggatgagacgccgaagctggcgagcatgtctaaataatcgctcaaattgagatccctccttttttgtatgcatatgcaaaagcggaataatggttgaaaacgatcgaatgccagcatcccggaaaaatcggtatttaagtgattcgagttgacgaataaagattcgtccatgataatatggtaagaagaaaaggtggtgttcgtttgaaacagcagttgaaactctttttggctgtattgattacggccgtcgccgcctccgcactgacgctttatctggtgggcaaaggcagcggcggttcagtatattccgcttcagattccgagaaattcgaaaagctgatggcggcgtacgacaaaatcaagagcgactattatcaaaatgcagacgatgaaaacctgactgacggcgcgattaaagggatgcttggagctttggatgatccatattctacatacatggataagaaagaagctaaaagctttgaagaaagcattacatcttcttttgaaggaatcggcgcccaagtagaagaaaaaaatggacaaattctaatcgtcgcgcctattaaaggatctcccgcagaaaaagccggcttaaagccgcatgatgaaattcagaaagtggacggcaaaagcgtaaaaggcaagaccgtcaacgaagcgacagcgatgatccgcggcaaaaaaggcacgaatgtcaaacttgttctcaacagggaaggcgtcggccaaatcgatgttacgattaagcgcgatacgattccgatcgaaacggtttattccaaaatgatcgacggcaatatcggtgaaatccaaattacgtctttctctgaaaataccgcaaaagaactgacaaaagccattgatgacttgtctgaaaaaggtgcggaacgattcgtgctggatctcagaggaaatccaggcgggctgatggaccaagcgattatgatgagcaacatgtttgtcgataaaggcaaaaccatcatgcaggttgaatccaaaaacggaaaaaaagaagtgtacaaagctgagaaggagcgaaaagtgaacaagccgaccgttgttctcgtcaacggaggaacggcaagcgccgctgagatcatggccgcagcacttcaccagtcttcaggcatcccgatcgtcggtgaaaatacgtttgggaaagggacggttcaaaatgcggagagcttctccgacggatcgaccgtcaagctgacgattgccaagtggctgacgccgaatggggactggattcacgaaaaaggaatcaaacctcaatataaagcggagctcccaagctatgccaaactgccgtacctggattccaaaaaagagtataaggcaggcagcaccggagacgaagtgaaagccgcccagcaaatgcttcaagcgctcggctataagctgaatgcgactggagctttcgacgcacagacggaagctgccgttaaggcttttcaaaaagaccaaaagctgaaaacgacaggcatcctaacgggcgagacgacaatcagcctgacaagcaagctgcaggataagctttccgacaatgatacgcagttggataaagcgattgagatcttaaaaaaagagaaataaaagaaacccttgcgctcacacggagcacaagggttttttggtgatcaggcgcttttttgcacattcttcttagtatgaaacaaatagttgatcacagaattgtgttttacatttttcacaaaaaacggattcaacaagacaacagtcaaaaggttggctgcaaggccccagaatccttcgtaaatgccgaaagtggcccctgtcaaataaacggtaaatgtaacggcaaggccgatgagaagaccgatgatcgtcgcttccttcgtctggtttttccagaacaggctgatgacgatggccgggaatatctgcaccatgcctgaaacgccgagaagctgaagcgtgacaagcgctgcggggaacagcattccaaataaaagggccaggccgatgacgacaaataccattgagcgcgtaatgatcgtcagtttttgccccgaaacgcggggattgatcaaatcgcggtataaattgttggcgaatagattagacgccccgatcgccatgatcgaacacgggatcagacttgccagggcaattgttgaataggcgaatccttgcgtgacgccgccgtaggaactttggattaaatacagcaaggcaaatctcggattaatgtcatcgggaagtacgagaaatgcgataaagcctaagaaaatgactaagatcaatacgatattgtacagcggcagaaacatgctgttttttctgagcgcatccgcgctgttcgccgtgaagacgcctgtcgccgcatgggcccacatgaacagggcaaacgcggaaacgatcgatgccgtgatgaaccaggcgatcccgcgcggtccgtcagaagggatcgtcagcatatgcggcgcttcatttgcaagcttgtcaatcatcggcgtccagccgttaaaatggatgagcggcaacgaaacgaccataaacagcatcatcacccaaactaaaatatctttaataatggcggtatatgtaggacctttgatgccgctgaaaaacgtatagagcgcgacaaggatgaatgatatgatcacgacggcattgacgttaataaaccctgtacccgcgacttgaagcgtatcctggattccgctgagctgcaggcagatatacgggatcagcatcaagacgccgacaatggcaacaagcgaagacagcagcttgctgctgaaacgttcccttgcgtaatcggccagcgtcgtcagctgatgtactttcgccaccttccaaatcttcggcagaaaaaagtacgcgataaaataggccaaaaccgaataagggatcgcgaaaaaagcaacgcttccgcttgtaaaagcggtgcttgtcaatcctaaaaacgtgtaggctgtatacaagtcggcgccgacgagaaaccagacgagcagcccgccgaaccgccttccgccgaccgaccattcttcaaccgatttccgcgactgtttattgctgccggcgataaatccgatacaaactacggccaaaatgatgccggcggtaatgaggagcgctgttagatttccctgcatcactcataacctccgtttcttttctcaaatctgtaaatcgcaaatgtgatcagcggtgtcagcacaatccacagcaccagccaaaaatgaaaaaacggaagtccgaaaacgatcggatcgatccggtttacaaacggcagcaaggcaagctgtccgataaaagggatgatgaacagaacccatttgaaaagctgttgattcaccttttttcctccttaagccattttgatgttcataatcatagcagttgtcagatttaatcacaagataattattagaaaaaagtgattttttaaattatttaaacaatagttctgtcttgcatattcgaaaacataactttacaataattaatatcttgaattcaagataaaaagatgatgatggaaacagaaggggtgcaccatattgcaggaggctccaaagtaatgtatgggaaagagacagtgaacagggctctttgattgatgaacagttggagagtctctttcggtgaattgaagctttccgaaatgattgcaggccaattgaaggcatacttccaaaatggaaaaggagtgaaaggaaatgaattatatatatgaaaaaggggactctgatctcaccctgttgttattgcatggaacagggggaaacgaacacgatcttctgccgatcggcaagatgattgatcccgatgcaaatttgctcggggtcaggggaaatgtgctggaaaacggaatgccccgttttttcaggcggctgagagaaggggtgtttgacgaaaaagatttgatcgaacggacggatgaattaaaaacgtttctagatgaagcagccaaggaacttcactttgacagaagccgggtggtcgcaatcggctattcaaacggcgccaatatcgcgggaagtctgctgttccgtcatgaacatgtactgaaaggggcgattttgcatcatccgatggttccgtttagaaatcgcaagctccctgatatgacaggtctgcccgtgtttatcggggccggcaaaacagatccgctctgtccgccgcaggaatcaagcgagcttgccggctatttcacaaacgccggcgccaaagtgctccttcactgggaaggcggaggccatcagctgacacacggcgaaattgaaaaggcgaaaatctggtatgaaaagcatataaaagcataaaaataaaccttagtccttttttgggactaaggtttttaacatgtttacagccatgtagatacgtcagacacatcgaaacgattacttttgtgcgcaggtttgaccggctttccgaccgaaatcagcataaccggtacatagcgttcatcgatgttgaattctttcacaaatgcttccttgtcaaagccgcccattgcgcatgtgtcatagcccattgctttggctgcgatcatcagctgcatggctgctagagatgcgtttgtaaacgcggcgtctcttgcaaatccgctgttttgataagcgccgttgatttgtccgagcagcgtgtttttgatttcttcagtcatatagcctgcttctgccagagggccgtatacggcttcaccgttcagattcgcttgtaagtccccgagcaccgctacgaccgcagaggcctgactgacttgcttttggttgaacgcgatcggaaggagcctatcttttgattcctggctgtgaaagactgtaaaatgccagtgctgcagattccaggctgacggagcctttgtggtgatgctcagcagctttgtcagctcctctttggaaatcgaaacgcttgtgtcatattctttaatcgaagtacgctcttccagaatgttgagagcggtgttttcttgtgaagacatgtgacttcctcctttgggctaaacgtgttatgatagagttagataaaaagttagaaacttactttttgtaactttaatgagtattttaatggcacacattatatttgtcaactggatatggaggggtgagagaattggggtttacaatgtgtcctagaatggaagccgccttttctttactcggcaaacgatggaatggactgatcatccatgtattattggatggacctaaacgatttaaagacttgactgaaatgataccgatgatcagccagaaaatgctggctgaacgtttaaaagagctcgaacactgcaaaatagtcgagcgtcaagtgctcccggaaacgccggtaaaagtgatctatcaattgacagacaagggaacggcgctggagcctgtcctcaaggagatacaaacctgggccgaaagccattgtgatccggaagggagctgaccggattgaacagtaaagaaactgtcgtcattacaggcggggcaaaaggcattggaagagacctcgtggccgcctatgctcaaaaaggttttatcgtcgtattcgccgacgtattgaaggaagagggtgaacagcttgaaaaagagctgaccgcttccggtgcgcgggtccaatttgcaccttgtgatgtagcttctgaagaagacgtgaaacggctgatgcaggaagcttcccgaaacggccgttcgatatcggcgctcatcaataatgcgggccgatcagtttggaagtccccttacgacttgacggctgaagaatgggacggcgtcctgaatacgaatttgaaaggcgcgtttctttgcgcaagagaagcggccaaaagaatgaaagaggcgaaaacaggcggtgccatcgtcaatatcgcttcgacaagggcatttatgtccgaaccggactcagaagcctatgccgcgtcaaaagggggcttaatagctttgactcacgcattggccgcgtctttaagcaaagattcaatcgtggtcaacagcatttccccgggctggattgaaaccggtgattatactgccctgcggcctattgaccacgcgcagcatttgtcaaacagggtcggccgcccacaggatatcgtcaaagcatgcttttatttgaccgatccggacaatcgcttcgtcaccggtacaaacataacggtggacggcggaatgacaaaaaaaatgatttatgaagaatagcccaaacgtttcccgactttatgaatacctttactataggcagacataaaggaggataaaagccaatgaaccctcatatgctttattcgagatcaggtcctgccggatacccggccagattcccgttattctggggttttggagcgccgcttgtcggcggattgctgggcggatttctcggaagcgcgatttttaactacccaagaccttacgcttacccgccgccatacccgggaccttacggcggcgcgccttattacggctacggggcagctcctggggcttttccgtacggaggtgttccgggcgcagctccatacagaggagcaggaccgggctattgatcaataagccaattgttgctggcgtctaaatgccggatgtcaatatgaagcggcggccaaagcctgcgaatcttttcgcctttggccgccgtctcattctttccggatcgatcagtcagggaactgtacttttcccggtacggtatatgcgcttgacgtcccgttttccggaagcttttttatcgtgtctttgacgacttttcctcggatatctgtgatcctgactttaagcggacttgtcccgagattggtgctgacgaaatggttgtaatccgttttctccatgttgatccactttccgtctttgtaatattccattttcatgacgggatatttgtggtttctgacttggatcgccgcccaccattggctgctgccttctttgatccggtaagtgaaattgccggtaatcggcgctttgactatacgccatttaatgtcgattttgccgtctttcatatcgccgatctcgcgaaaagcgttcggtgaaaggtcaagggctcccggcgctccttcaggatacagatcggtaacatagacggtcgtttttcctttcggcccttcaacccgcagataggcgccggcaagagcagctttcacaccgcggtaattcatatctgtcggatttaaagcggtgatcttcatattggacggaatagggtccaaaagcaatgcgccgccggagtagcccgaccccgtataagtggcatagcccgtatgcagtgagttgtacgcagcggaagcttgaggcgaaaaacaaaggattgtcaaaaacattgctgtgatcaatatgctgattttctttttcatatacatcctcctgttttataaattgagaaccattatcattataaggacaaatcgacaacagccgaaagaggaaatagttacagagactttttaaggaataatgactaacactgtcaaaatttaaaggcgcggccgaatgtcaggcaaatgagatgatcatccttgaggagtagtgttaagatgatacaggaagaaaaaaaacagcctgctttttcaagctggccgttttcaaaacgtgatgtcgatttcagacaggttaaagtcctcattttttaagaacatcacttccaaaatgccgtctttaaatattgctttcgtaccctttctgcgcactagagaggggagaacgactttttcctgccgccctttttcagggtagttttctatgatcagggtttgtgaagtatgtttaattttcagaaggttaagctgttctttggtgagcggtattttaacaaatacatggcttgtcgtttcaaaaatatcaatcggatcagattcatctgccgccgatgtttcttttgagagagggtcacgaaaaggaaattgaactgcataccccggtccgaaaacgcttttcatcatgtggtggatatattgctccacatctttcgggtcagcgttttttaatccgtccttggaaaactgctgaaatggaaaaaagcgttgccaatcaaacacgatcacacttcctttcacatagacggtacagtatatgcaaaaaagtgcggaaagtgatgaagaagaaaggaaagaaacagacatgaatcattcatctcaaacgaaaggaatcatttacacagcgctttcttatttgctgtgggggctccttcctttatattggaaagtgctcgatcagacggccgcgctcgatattctggcgcaccggattatctggtcatttgtttttatgtgcggggtgcttctcgttttgcggcagtggaaaaacggagtcaaagcatttcgctcgctttcgggaaaccgaaaggaatttgttccgctcattttgtcgtccgttctgatttcgatcaattggtatgtctacatatgggccgtcagcaacggctatattcttgaagcgagcctgggctactacatcaatccgctcgtatcgatcgttctcggaattgtctttttaaaggaaaagctaacgcggatgcagggagcggcagttcttctcgctgccctcggcgtgcttatttcagcttttcagtacgggtccgtgccgtacatcgccctgatgctcgcattcagcttcgggctctacggactggcgaaaaagcgcacatcgctctcaagtgccataggacttactttggaaacgatgatgatcgctccggttgcagcgatctacctgctgttcttcagccatccggagaaggctcaggcagcctcagggagcatcggcatgatggtgctgctgtttctggcgggggtgctgaccgcgattccgctgcttttatttgcggaaggtgcaaagaaactgccgctctatcaagtcggcattttgcaatatatcgctccgaccattacattatgtttaggcgttttcgtctaccatgaaccgttcaacagcagcaaggtctttacgttttcctgcatatgggcggcgctgatattgtttacactttcgcaatttcaatggaagagaccggagaaggtatttttaaaaagaaaaaaatcctttcatccgtaagccctctttcttttcaagaaacaccgattatgtataattaaacattattgaagcaattcggaggttgttccgtcatggcagatgaactggagcttttccaggcatataaaaccctttggaaaaaccggacgatggagggggaaggcagggaggcgcttcatcaggcggttgatgatgagctgaacgacctcggcacccatccaaggctcagaaagacgaagcacgaaaaatactatcaatcaatccggcgcatcgtgaattcacaattggaatcagaaatgaagctcaagctgattgaatgtcatacggaacgattggagttattaacaaacgaagaaagcagggagtaacatgaaagcaataaaaaaagaagatgtgcaggcttctttggaaacatttttaaatcagcctgtttacattcatttggaaacgacaaccggatcgtattccgcgcataaagatgagcagaacatgaccgtggtggcatatatcagaaacgcgaaggtagcctgctcccgggccaaaatcacgggcgagggaccatttcgcgccggtttgaaaaccgaagacggctggatctacgccgaaggcctgacggattatacggttgacgatgaaggaaggttgcttcttgccggctatttgccgggcggcaaactcgccatttcgcttcaaatcagcaaaaagccatttgcagtctaaaaagaaggtgttataagatgaaaaaacatttactcgtgatcctgccccatcctgatgatgaatctttcggagtcgccggcttgatcgccttaaaccgaaaagaagacattcctgtaacatacgcttgcctgacgctgggcgagatgggaagaaatatgggagacccgctttttgccaacagggaaacccttccgctgctcagaaagcaagagctgatcgacgcctgcagggaaatggatgtacaggatttgcgcatgctcggataccgcgacaaaacgctcgaattcgaggatgaagaaaaactggccgatcaaattgaggctgtcatcgatgatgtaaacccgagccttgttgtgacgttttaccccggacacggcgttcatcctgaccatgatgcatgcggtgccgcggtcatcagggcattatcgcggaaaaagaaagaggaccggccgcgcgtcttatgcatggctatcactcaccacagggaagaggttcttggcaagcctgacgtcgttcttgatatcaaagaagtcgcggatattaaaatgaacgctttaaaagcgcataaatcccaaacaggcggccttttgaaagaaatagagaaaaaactcgccaatggcgagccggttgttgagacatggtttgaaaaagaagcattttggacctatcaatggaatgattaacatgatcaaaaaaggtgtcgggcatttgagcccggcaccttttttacatgctttgagtgtgaatatagcggttttgaatgcgtttgagcctgaagaacagcccgactgcaccggccgctagccccgtgatcagcccgatccagtatccgaaagctccgaatgaagtatacgttccgattacaaaaccgaccggaagcccgataatccaatatgagacgagagctgtgacaagcgtgtagttgacatctttatatcctctgagcgctccttgaatcggcgcggcaatggcatctgacagctgaaaaaacaacgcatacagcaagaagtccttggtcagaagcaggacatcccggtcagccgcgtacaaaccggcgatctgctctctgaacagtagtatgatgagtgcggtgaataatgaaaaaccgaccgctattgaaatgccgagatagctgtaggccctcgagtctttaaaccgtttggccccggcttcaaagccgacgacaatcgtcagcgtcatcgatacgctcaatggaagcatgtaaagaagcgaagcaaaattcattgccgcctgatgggaagcgatcgtgaccgtgtcaaagtggctcatcagcaaggtgacagctgcgaatatactcgtctcaaagaagatggcgaaaccgatcgggatgccgatcttcagaagtttcatactttcagcaaaagaaaatgaatagaatgttccaaaaatcctaaactggtgaaacggcgtctttttatgaacgatgtataaagagatcagacaaatgcaccaatatgtgatagcggaagccaaaccggctcctgctcctccaagctttggaaacccgaagttcccgaaaataaacaaatagttcaagacaaaattaatgggcaaagaacaaagcgtaatcagcatcgtcacccgcgttttcccgagtgaatcaataaagcagcgcatcacattgtaaacaaacagcggcaatatgcctagcccgatgcagattaaatattgctttgcgatgacagctaccttccgttcaagatcgagattctccagcaccggatcaatcagaaaatatccggaaacgatgacggcaaggctgatgattccggccacatagatcgattgaataacagtataagggacatccttttgccgcttggcacccatcagctgggcgaccataggtgttacagccgtcaaaatgccggcaagcccagtataaacgggggtccataaactcgagccgattgcgacgccggcgaggtcggcggcgctgactttgcctgacatcaccgtgtcgagaaccgtaatgagcgacagtcccgcttgcgtaatcaaaatcggaattaaaatcgttaaaaactgtcttgctttctcccgcaaatcctttgtttccctcatatcagttccccgtttcttttggataacgagagaaattataacacgttatgtataaaatgcaataaatgtctgttcaatcttttttcgtctgttttgtttttttaaacatttgcacataaataaaggaaagagaaaggatccctaaacacgtacataaatattgacatattttttgaatggccaagaagattcacctccatatcttaaaatgcgccataaaaggaggaaacatgcatgaaagctgcggtgataaaacagaacccttttttacatgttttgatagtatattagatctattaatatatataaatgagtgagcattaagttttatgtttctgtatatcgttatattaagataggaaataagaatctataggtgaaatagtaaaacgccgttcgatctaaaaaaaagatactcccaattccggatgttggcaaaaaaaatgtatgatatagtcaatttatggtttcgtggaggaatttgtgctgaaatgtagaattgtataaatgatcctgatctttgcttttcgattaggcaatagatgaggatagatcggcgatttccggaaaaataaagaatatgaacacgcagttttcacaccctcaacatgaacgctggcttgcctacctgtttccgtttgatccgagagaaagagaaatcggcagtaaaacggcacggaaatccgcatgttatggcgtctattctggctgtttcggcacatgcagcatatctggtcaactcccttctcgctgttttcaccatgaacctctgattttaaaacaactgatcatcgtatttccgaaaacttgaaactcaaaacctttgcaaaaaagcatccggcacctcgagtacacagaaaaaagtgttgatttttgtcaatatgtctatcagtctgtatttttaatgagaaatttgtaaaaaaacaaaaaagctattaaaaaaatataaaatagaccgatacaaatcgtgaattgcattttttgcttaagagtataaaagggggatttcggccaaaggcatacatatggtgatcagatcacccgcctgatcggctggataaagtcttaagcaatggcaaatgtaatggcatacatagagagaacgaaaatgaaacgggaggttaagaggttatgaagaagaagatagcagcaggtttggcggcctctgcggtagttggaacttcattggcggcgtcaccggtcgaagcccaaaccatcaaggtgaaaagcggagactcactgtggaagctttcagctgagtacaatacgagtgtttcggcacttcaatcagccaacaatctttcatcgacggttatttatgtcggacaaactttaaaagttccggacggcaagtcgaaaagcagctcacagacaaaatccgcaagttccagctcaagttcaagcgctgccaagtccacttacacggtgaaattgggagattccttgtggctgattgccagagactacaaaacgaccgtacaagagattaaaaacttaaacgggctgagcagcgatatgatttatccgggacaaaagctggttattaaaggaagcgcaaaaagcgccggttccagctctggatcaagctccaaatcatccggctcatcatccggctcacaaagtgcaagcagttcaagcagcacatacaaagtcaaattgggcgactctttatggaaaattgccaatagtttgaatatgacagtcgccgaaattaaaacgctgaacaacttgaagtcggacacgatctacccgaaccaggtccttaaagtgaaaggaacagtttccagcggaagcaaaccatcttctggttcgtcttcaagctcttcatcaagtaaaacgaacacaggcagcagttcaaaaacgaccacttacacggttaaaccgggcgattctctgtggaaaatcgcgaattcgatgaaggtaacggtacagagcatcagagaggctaatcaattaaaaacagatgtattgcaagtcggccagaagcttaaaatttctggtgcatcgtcttcagggtcatctggcagcccatcttccagctcgccgaactcttcagtttcaaccggcacttcgacaagcgcaaaagtcgagcggatgattgcagaggcagaaaagcatatcggcgtgccttacagatggggaggcaacaatccttccggttttgactgcagcggattcatctattacacgttgaacaaagttacatctgtctcaaggctgagcgcagcaggatactggaacatcatgtcgccagtcagccagccttcaagaggtgattttgttttcttctcaacatataaagcgggcccttcacacgtcggcatttatttaggaaacaacaagtttatcaatgccaacgattccggcgtcaccgtgagcgacatgaacaattcctactggaagcagcgctatctcggcgcaaaacggtattcattttaaaaaagccattttatatggcttttttttgcgtggtttcaggatgggaaggacaggtttaatgcccctcttcattgtctaaactgaaaagaaaagcgaagggggaagctgtttgagaacattacattacatattgctcgcatgtatgtccgtttgtttggcagctgcatgcacacagcaaaaagaaatcgagcaaaaaaatgccgaacaggaacataaagaaacttttgaaacgatgacacagccattaaaagtaccgctgatcaaacgcgacgggacggagaccggttttatagaagtgtatgaatctgctgcagaaggccttgatattagagtgagcgcccatgatctgccgccgggcatgcttgcttttcatattcatgaaacgggcgtttgcaaaaagcctgattttgaaagtgcgggtgctcatttcaatcctgatcaaaaggagcacggctttaacaatccaaaagggccgcatgccggtgatttgccgaatattgaagtcggagcagacggcaaagtcgacgtcatcgtcaatgcgccggcagtcaccctcgatcagaaaagcaggttcagtctgctggatcatgacggaagtgcttttattattcacgagcatcaggatgacgatttgacaaatccatcaggtaactccggagcccggatggtttgcggagcgctgacgaacagcggaaaaaagtgaatcggcgcctggaagccgtttatattgagggcagcgcgtcttttctagtatacttaaatatagaagacgcttttagaaaggaattttacaacacatgaaatatgatctgcacgaactagagctgcctgaaaagataaaagagcggctgattcagtctgccgctaaacctgttgacgcggaataccaatcattgattgggacgcccggctatgaagcggaagacagcgccattctctatgacgcgatgatcgcgttgtcactcggaaaaaacgttttgttaaaaggtccgacaggttccggaaaaacaaaacttgccgaaacgctctccgcttattttcaaaaacctatgcacagtgtcaactgttctgtggaccttgatgcagaggcgcttgtcggttacaaaacgattgaaaacaccggcgggaacgcctctattgaatttgtcgaaggtcccgtgacaaaagcaatgaacaacggccatttcctatatattgacgaaatcaacatggcgaaaccggaaacgctgccgatcttaaacggggtgctggattaccggaaaatgatgaccaatccgtttacaggggaagtcgtcaaagcgaaagagggattcggcgtaattgcagcaataaacgaagggtatgtcggaacagtcccattgaacgaagcgctgaaaaaccggtttgtgatcatcgacgtgccatacattaaaggcgacctgctgaaacgggtgcttgaaacacaatccgaactaaaaaatcagaagctgctggaccggtttgtcaccctgtcatcggatttaatgacgcaagcccacaacggacaggtatctgaagaggctgcttccatcagagcgcttctcgatacttgcgatctgtcgacgtatattccgccgctgcgagcgatcgaacggggcatcgttgaaaagcttgatgatgaacgcgaaaaagcggcggtccgaaatattgcccaaactttgttcgaatgagggttttttatgaagtttattaaattcaatgacagcaagattgactctttgctatttatggagctgacagatctggcgaaaacgctcgcgaaaagcgatcaggttgaagtggagtacggggttcagtcttattacaatccttttgagaaaaagatctacatgagccacttttggaaagacaggaaccaccgcgatatggtagacggcttgaagagcgatgtatacttgcggtcaatcggctcccgctacagctcgatgaaagacttttcccgcatgctggactcggctcggaaatatcagtttaagagtttggcaaaacagttgtttatgctttttgaggatatcagaattgaagagtccatcaagagggagcgccccggtacaaagcaggtattttcaaaccggaaatcgatgtaccgcaaacactttgcgacacagctgacgctgaatctggagcggagcatttttacagatgctttgttttgcgctgtatatcttaagctgaccgcggagtcgccgcttgaagagataccggctatccatgaatcggtcgatccgatgaaggggtttatagaagccgagctcgcccgcgtattcgaagcgcgttcaactgctgacatcgtttcgtttgtaaacgggttaatggaaggttttgaagaagtgctcgaaaaagatatgctgaatacgtacttcttttttccggaacttgactacgaacaagttgacgaagaagcgctctttcaagatttaaaagcaaaaccgaagctgagcgaggatctgacgctggaagagaaaagtgcgggtgacgaggaagttcatgaagaagaaatgccgacttggcacagagaaacggaagctccggccaaaagctttctccagtttgatttggagcacggcgcaaaatccgatatttccggcggcgctttaagagaaggagaagacggcgaccaagcgctcgggtctgttcaaggaacggcgaagcagacgaaaaggaaagactactcaaaacttgaatcgcttgaatctgttcaagatgaaccgaacgccggaacagcccaagccggtaaagaaaaccgctatgccttttcggtgatgaagccgccggaaaaaccttcgaatgaagatatattagactaccaggctcaagccaaaacaatcgaatcatatcaaaaacggctcaaacagatgattcaaaaaacgcttgagcataaaaaaacactcccgagaaccgatttgcatgcaggcagattgaacaataaactgctccgttactttacagagcgcaatccgcgcctgttctataaaaagcaggagccgtcaacagaaatcgacgccgttttcacattgctcgtcgactgttcggcaagcatgcatgacaaaatggcggagacgaaacggggcattgtgctgtttcatgaagcgcttaaatcagttgctgtccctcatcaaatcgtcggtttttgggaagatacaaacgatgcgacagagacgagccagcccaactactttcatacggtcgtttcttttgcggattccttaaaagcaggagccggaccgcacattatgcagcttgaaccggaggaagacaaccgggacggatatgcgatcagacagatgacgaagatgcttgttcaaagaagcgaagctcagaagttcctgatcgtcttttcagatggagagccggccgcattcgattatgagcaaaacgggatcgtcgatacacatgaagcggtgatggaagcgcggaaacgaaatatcgaagtcatcaatgtatttttatcaaacagcgaaattgaagaatcgcaaatgaagacgatacaggacatgtacggaaagtacagcctttttgtcccagacgtcgatcagcttcccgatgttctgtacccgcttttaaaaaagctgttgaacaaaagtataggatagatatgacagatggcagcaatactcgcggccatctgttttttatcgtgaaaacacagtgaaataacgaaatttttattatttttatcaacttaattttttaaggagcacatccggatgttaaaaaatagacggccaggggaaatatgtgaataaataaagatcaggtcctgaaagaaagggatctgaaagttcgaaattataaatttttttatttttcaagacgattttttaattttatttgaacaatctgtgtagaaacaaatgagaaacagtggtaaaatgtacgtggaagcgtttttattacatatttctgggcgcaaggttcagaagatatattaagatagtgaatcattcacttgattattaggttgggggtaatgttcaaatgtttcaaaatagtatgaaacaaagaatgacttgggaagaatttcacggtccgaacctcggctatgtgctggagctttacgatcagtacgtcaaggatccagaaagcttggatgctgatttaaaagagatgtttgacgaacttggagctcccccgggcgatattagggccgcctctcaaaaaaacgaagaggcagatttcacggctggatctattcaaaaaatcgcatcagcggtaaaacttgcagaagatattagaacctatggccatttaaacgcttccgtcaatccactgagaaaaacacaagagaaacaggagctttttcctcttgctgagtacgggttaactgagcaggatgtgaaaaaaatcccggcgtctgtcatatgcaaagatgcccctaaagaagtaacgaacggtttagaagccatccagtacttaagaaacacatacaaaaaatcgatttcttttgaatttgaccatgtgcacatttttgaagagcgcaactggctgatgaaaaagatcgaatccggggaattattcaccccgaaatcgaaagaaaaactggtagaagttttaagaaggcttacagaagtggaaagccttgaacagtttctccacaaaacctttgtcgggcaaaaacgcttttcaatagaaggacttgatgcgcttgtgcccatgctggatgatattatcgccaagtccgtttcggcaggtacgacaaacgtcaatatcggaatggcgcacaggggccgcctgaatgttcttgcgcatgtgctcggaaaaccttatgaaatcattttttctgaattccagcatgcgccgaacaaagatctcgttccgtcggaaggttcgaccgggatcaattacggctggacgggcgacgtaaaataccacctcggcgccaaccgccagattcaggatgagcatacgaaaacggcgcgcattgcgctcgcgaacaatccgagccaccttgagttcatcgatccgatcgttgagggatcgacaagagccgcccaggaaacgagaacggagagcggctatccggttcaagacgtcaaaaaatcgatggcgattctgattcacggcgatgcggcattcccaggggaaggcattgtcgcggaaacgctgaatttaagccagcttaaagggtatcaagtgggcggagcgattcacattatcgccaataacatgatcggctttacgacggaaagcaatgagtcaagatcgacgaaatatgcaagcgaccttgcgaaaggttttgaaattccgatcgtccacgtcaatgctgatgatcccgaagcatgtctttcagcggttcagctcgctgttgaataccgcatgactttcaacaaagactttttgatcgatctgatcggctaccgccgttttggccacaatgaaatggatgagccgtccgcaacgcagccgatgctgtatgatgcggtcagaaagcatccgaccgtcaaaaacatctttgctgaaaagctgattcataaagggatcgtcgataaagaaaccgtcggcaaaatcaaggacgctgtccagaagcgtttagaagaagcctatcgcaaagtgccggccaaaaaggaagacatgacgcatgaaatcgtacttccagagccggtctccaacggttttcctgatgttgacacatcggttgattttgaaactttgcgcaaaatcaatcaggagcttgtttcatggccggaaaacttcaacgttttcgataagctaaaacgaatccttgaaaggcgcgccaaagctttcgaagatgaccgaaaagtcgactggtcgcttgcagaggcgatggcgtttgcgtcgattttgaaagacggtacgccgctaaggctgaccgggcaggattcagaacgcggcacattcgcacaccgcaaccttgtccttcacgacagcaagacaggggacgaattcatcgcgctgcatcaccttgccgatacgaaagcgtcatttgcggttcacaacagcccgctttctgaagggtccgtcctcggcttcgaatacggctataacgtgtcttcgccggaaacgatggtgatctgggaagcgcagtttggagattttgcaaatgcggcgcaagtttactttgaccagttcatttctgcaggaagagcgaagtggggtcaaaaatcagggctggttgttctcttgccgcacggctatgaagggcaggggcctgagcattcaagcggaagaacagagcgattccttcaattggcggcggaaaacaactggactgtcgccaacctgacgagcgctgcccaatactttcatattttaagaaggcaggcgaagatgctccttcgcgaggagatccgcccgctgatcatcatgacgccgaaaagcctgctgagaaatccgaataccgtgtcagaagtgcaggagctcagtaacagcagctttaagccggtctatgaaatgtcaggactttcccatcaatatgacaaagtgacgcgcctcgtcctttcaagcggcaaagtttcgattgacatcagcgaccatttcaataaaatggaaggtgaaaaggattggctgcacattgcacgggttgaagagctgtatcctttccctgcaaagcatattaaagcgatcttcagcaaacttccgaatttggaggagatcgtctgggtacaggaagaaccgcaaaatatgggcgcatggaactatatcgagccttatttaagagaggtagctccaaaggacgtgaaggtccgctatattggcagaagaagacgttcaagtccggcagaaggggatccgacggttcataaaaaggaacaggaacgcattgtatctgatagcttgactcgcaaaaattaagggggaactataaaatggcggaaattaaagtacctgaattagcggaatcaatttcagaaggaacgatagcccaatggctgaaacaaccgggagattatgtagagcaaggggaattcctgcttgagctggagactgataaagtcaacgtggaattgacggcagagcagtccggcgttcttcaggaagtgctgaaagattccggtgacacggttcaggtcggcgaaataatcggaacgatttcagaaggcgaaggagaaggaggcaaatcaacggctccgcaagctgacgctcaagaaagcgccggcgcttcggaagagaaagcagcctcgtctgaaaagacagccgaacctcgcgaaggtgcgagcgatgaggcggatacagccaaaacaagaactatcgcttctccggctgcccgaaagctcgcccgggaaaaaggcatcgatttatcggaaatccctaccggtgatccgctcggaagggtcagaaaacaggatgttgaatcttatcaaaagaacgagcagccgccaaaagctcagcctgaaccaaaacgcgcaacacaggcgccggccgctaaacaaaccgaagatgctggtaaacctgtagagcgtcaaagaatgtcccgccggagacagacgatcgccaaacgcctcgttgaagttcagcacaccgccgctatgctgacgacattcaacgaagtggacatgacggcggtcatgaacttaaggaagcgccgaaaagatcaattcctggagcagcatgacgtgaagctcggattcatgtcattctttacaaaagctgttgtcgccgcgctgaaaaaatatccgctcctcaacgcggaaattcaaggcgacgagcttgtgatcaaaaaattctatgacatcggaatcgctgttgctgcgccggatggcctcgtcgtaccggtcgtgcgcgatgcggaccgcaaaacctttgccgatattgaaagggatatcggagagcttgcgaagaaagcgagaaacaacaaattgtcgctcaacgagcttcaaggcgggtcctttacgatcacaaacggaggaacgttcggttcattgttatcgactccgattttgaacagcccgcaagttggtattttgggcatgcacaaaatccagctgcgtcctgtagcaattgatgaagagcgctttgaaaaccgcccgatgatgtacattgcattatcgtatgaccaccggatcgtcgacggaaaagaagcggtcggcttcctggttacgattaaaaatctgcttgaagatcctgaacagcttctgttggaaggttaatcataaaaaagctttggccgtaagtacggtcaaagctttttatttatcatttgcggggcaggagaatgattgtcattcttctgtttatttgtttttttggcccagtatgtcgcaagccatgaacctgaaagattatgccagacgctgaacacagcgctcggaacagctgaaagcggggagaagtgcgccgtcgccaatgccgcgccgagacccgaattctgcatgccgacctcaatggacacggctttttgcgacgcataatccattttaaagcactttgccaaaacaaagccgaggaaaagtccgaggccattatgaagaacaactaccgcaaaaatcagcagccctgattgaataatgttttcccgattgcctccgacgactgcggagacgatggcgacgatgccgagaacggagacaagcgggagcacctgtacagcttttttcacttgttttttaaagaaaaattgaacgatcagcccggcgataatcgggagcagcaccgcctgtaaaatcgacacgaacagagagcccggagataccggaagccattccttcgcgaaaaataaaatgagaaacggcgttaaaaaaggggcaagcagtgtggaaagcgttgtgatcgccacagacagggcgatattcccctttgccagaaatgtcatgacgtttgatgctgttcccccggggcagcatcccactaatataacccccactgctatttcgggggggagagcgagtccataggccagtccaaaagcgagcaacggcatcaccgtatattgaatcagcacaccgatcagcacatgcaggggacgtctcagcagctctttaaaatcgtccgctgacaatgtcaatcccatgccaaacataatcacgccaagcagaatcgtaatataagggacgatccaagtgaactgcgacggaaaggcaaagccgagaatcgcaaatagaatcacccaaatggcgaacgtttttcctgcaaattgactgattttgatcaaataactcataagtccagctcctcacatctgtagaaaatgtaacattctcttattataattaatattctgaataattcaatactagtaaaataaagaattatttaacataatattattatgtaaactgaaagaaatgtttgaaaaccttgacgaattcgtttatgctttttaaaatgatagtttgtagccatgtgcaattagaccgagaagaagaggtgcttaagtggaaaataaacaaaatatatggtcatcaaagcttggatttatcttagcttcggccggttcggcaatcgggctcggcgcgatatggaagtttccttatgttgccggaacaagcggcggcggagcatttttacttatgtttattctttttactttattgattgggcttcctttattaatggcggagttcattatcggcagaaagactcaaaaagatgcggttgaatcctataaggagcttgctcccggctcgctctggcactgggttgggcgcctcggcattatcacgtgtttcattctgctgtctttctatagtgttgtcggcggctggatcatcatttatattgtcaaagggctgaccggtgaactgtcaagaagtacggattatgccggtcttttcggggagacgattgcaaatccgtatctcgttctagggagccagtttgcatttatcatcataacgatccttgttgttgcaaaaggagtcagaagcggaatagaaaaggcgagcaagtttatgatgcctgctctgttcattatttttctgcttttgatcgttcgttcgctcacacttcccggttcaatggagggcttggagtttttcttaaaacctgatctttcacatatcaaagccgaaacggtgctgtttgcgcttggacaatcctttttctcgctaagcgtcggtgtttccgtgatggtaacgtacagctcttatttatcgaaaaaagaaaaccttgtacagtcagccgtttcagtgacattgctcaatgtatctgtagcgattcttgccgggtttgcgatttttccggccgttttttcattcggattatctcctgatgccggcccgatgctgttatttaatgtgctgccgtcagtctttcataagatgcctttaggaatcatctttttattggcgtttctgctcttatttttatttgctacactgacgtctgcattttcaatgcttgaaatccttgtttcttccttgtcaaaaggggatcctaagaaaagacaggctttcgcttgggcgggaggaattgcgattttcctattcggtattccttcagcattgtcatacggcgtgcttcaggatgtgtcgatttttaatctatccatttttgatgcggcggattatcttgtcagcaatatattaatgccgctcggcgctttgctaattgccgttttcgtgccgctcaaaattccgaaagacgagctttttgccgaattgaaagaaggctctaaaatcagcagaaaatggtttgcagcctggcttctgctgatccgctacgcagctccaatcgtcattattgtcgtctttttggatgctatcggggtattttaagaataaattgtttttaaaaggccggaccatccggccttttttcatgcagacagttgcgtgtcgcttaggtcagccgcactttcatttctcggcggtataaccggcaagaagtgtgtgatgaaaggggggagaggaagggaaaaagcggttgtttttctggtcagaaatttaaaaaagcttgccggtttaccggcaagcagaagagggggatacatggactttgattaaggtttacggaatgttactgtttggccgtttcgatcaaaccagcctttaaaggcccagttaatccagccgccgtctccttggtttgtaaattgtccgctttcaaatacccaaatgccgtaaatcacgccatgatagttggcagatccataaaatttaactcctcttaaaccattgtgatagccttggcttaagttgaacaccatgacattgtatctttgccctgcagaataaaaagcggtttccatgcagtttttgacgaaaccgctgcggttattgctttgaacgatagcgtctctaatcgagtttccgattcctaagaggtcgaggctgatgctgagatcaatagcggaagttttaaactgctgtttttcctcgttcaatgactgattgagagatgtaggtatagacatagaaggcaagcttgtaacagaactgtccgtatgttttgattctttcgcttccgataagtatggcagacaagtcaaaccgagcattaaagctgtaaagaaagcaaacatttttttcatgattaaccctcctaatataaattgccatttttcaaaaaactgaccagctgaatcagacaaacatcgacagtttgtttcatctattacctcccttctcatagaatagcttaacgatttttggaattagaagaatgaggaaaatagactattttccaaataaatcaaaaaatgttcacatttcatacttaaggctcgattttgggatatattgatagaatttgcagtcggtattttatttgcggcccttttcaaacagcatgtccgagagggcgaatggcaagggatttctctgccgactatttgaaaatcctcaagataaactgggatatataaacatttattggttatcttcttatatacaatagagggttgaagagaaagcatagatgcgcacgacctatgtcgacggctgccaggcgttttagaagcattcatgtaaggaaaagcgcgagaggattttaaggcacggcttattcatctctgatgacggggaatccggaggagaaatttcggcgacatcaggccaatgtccggcgcagcaaatgggcatgatctgccgaaacgcaaacaggacttcaactattgaagtcccgccagcgaatttgaatcagaacggctcccataaaacgcgctttgctgacgcaaatcgcctttcaggctctctccagtcaacgacattccaccaattatcgacgtattttgccttttcatttttatattgaaggtaatatgcgtgctcccatacatcgagcgggagcagggggatcacatcccattggctcatcagctgatgtttttctgcgatcagaatttccaagcggtgcgaacgcggcgcccagacgaggatcgcccagccgacgccttccacttttttcgccgcttcggaaaagtgttctttaaaggccgaatagctgccgaatgaacggttgatcatctccagcaattcgcctgtcggccgtctttttccttttgggtgcatcgcgtaccaaaatatcgtatgcaaatagtccccggctccgtggaaggcgagctctctttcccaatggttaacgaggtcaaactgtttggtttgcctcgctttctgcagttctttttcagctctgttcaaaccgtcgacatagctttggtgatgttttgtatgatgaagaaacataatttcttttgaaatatagggctcaagggctgaatacgagtagggcaggcttggcaggcgatggcctccgatcggcactgttctgaatggctgccggcctgcttgagacgcatcactgcgggagatggcttgatacacggcttctgcctgctcataccattcctgttcggtcgcacgaggatcatccaatgattgaaaaagtttttctaaatggctttctaaagaaggatcatctttcatctggtctttcaggtctttggcccatgacgatattttttctttgtaagcatctctgttcaatatgtctccctcatttccgcttttttaataaatgcgcttgaagcgagcaatgaaaacacaaaaggataactgtgatagcggatgtagaattggttcggcagcccgattcccgtcgggtattcgagtcgctcacgcgagctttcgtgttcatcgatgagaaaacggatcccttttatgatctgtgggtcatccggacgctcatattgcaaaagcgcctccagcgcccatgaagattgaacaactgttccaaagtgaagagggacaaaacgcttcgcttcacagcttttgcaagattctccccagcttccgtcttcacgctggatcgattttagccaggagatcgcttttttgacagacgtctggttggcggaaaccccgacagctttcataccggtgagtgcggcccatgtaccgtaaataaagcagacgccccatctgccataccaagagccgtccgctttctgatgatgatcaagccacctgagggcgcgccggaccgcaggatggttatctgtgaaccgccctttaagcccgagcagatgaagaacgcgtccggtcaagtctgccgttgacggatcgactgctgcctcagcggcagattcgagcggcagatttcgaataagcggatggtcaacatctttttcaaatgccgcaaaccctccgtccttgttttgcatggataaaagccaggcgagcccccggttccatgcatccggacgccgttgaaacggaatagcttttaatgccgcagcggtatcgtccaaatcgggattgtttgtattgatgtgtgaaaaaccccacccgccagggaccgcttgaggatttgagacagcccagtccgcttttttcacatgctgtcttttgagaaggtagtcggctgccgatgaggtggaagaatgttgttcaggcactccggattcctgcatggcatagctgatgagggccgtatcccagacggtggaagttgagttttccaaatgggctccttcctttccgcatgatgaaataagacttttgattccgctgactgcttttttgacaacgggggcgtttttagatattcccatcgcaagcaggctgtaaatcatgaacatggtcgcgctcgcatagctgtatagcgttccgtcttcttcgattctgtccagcatatattttttgccggcctcaaatccgagctgatggacgtaagccggccattgaaagagctgtttccattgcagattgaaagaatagaaggttctttcgtcaaaggcgcggatgttcagccattcgagagggttttttgacatggcttcatccaggtgccgaagcgagccgatttggttgttttttaaagagaatcgccgattaaacgtaatggccatggggacaaaatgaattcttgcgtatgtgctgaaatggtaaaaatgcagcgggaaataggacgggatcagcaaaaacgagagcggaatataggctctcggccatggatacagaccgttggcggcgagcatccacttcgtcataaagtggacgcccttcaatccgcctgcgtccttaataaaagcttcggctttctgcatatgcggagctttccggtcatagagccccgaagccagcattccggtatagccctggactgtcgcggtcagattgcctgctctttcatccgggtgattgcgaaacgcgccgtcttcgctctgccttgaacggattcgttcagcaagacttgcgatgagagaagagtcctgatcgccgagtgatgtcagcatcagaatgaaaaaactgtccgtcatcacgggcccttcaaaacaaaaccgccacgaaccatcagatctttgtctgttttgaagctctgcgagcgtcttttgcctgaaagctttcacgtcttctagtatagatcgcaatcttctcatctccttcatcttactgtattcatttgggaaatgtgtcatgccaatcgggtgaaaacagaagaacatagattttaaataagtgatgaggatacagtcgtcaagtcagcatgggcacgccgcgcttttattaggcggtgggcatcatcagggaatcgtgagtgtagtgatttgtctttaataacttcatttacccccgttccaacatcaggtattgtataaagagagactttagattaaacaatggttgggagatgttgatgaatgaatattgaacagatgctgtatgacaccgcagtcgaattgatcaaaaagaggtatccgaccggatggggcggggcagccgccatgtataccgaggacggaagaatcttaacgagcgtagccccggaagtaatcaacgcttcaacagaattatgcattgaaacgggcgccattctcgaagcccataagtatcaggcgaaaataacgcactctgtttgtgttgcaagagacgacgaacattccgaatgcaaggtattaacgccgtgcggggtatgccaggaaagacttttttattggggtcctgatcttaaagcagctgtaactgtaccggatgggcgcctggtttataaaactttaaaggaaatacagccataccattggtttgccgcgtatcaaaagtagcaggggaggggcgttcgatgttcaagagccgcaaggtttatctcagacctgttgaaaaaggcgatatggagagcttttacaaagccgttcaaaatgaagacatcaggtatatgacgggcacgacgcgcgaatatacgatggaagacctttatgagcactatgagagaatcacgagtgatgagacgcgctatgattttgccgtctgcttaaaggaggacgatcgtttgataggcgatctgtccattatggacattgaccggaggaatcgaaaagcggggtttagaattgctttgcacagccccgcttatttgaacaaaggctatgggattgaagcggtgcggctggccatgcagcttgctttcgaaaggctcgatcttaaccccctccagctcgaagtcttttcacacaatatccgcgcgctgaaagcatatgaaaaagcgggatttaaaatggaaggaaggatcagggaggctctttatatgaatgagcagtactcggatgaaatcattatggggatattgaagcgggaatacgaagagctgatgtcccgctgaatcggaggacgcgggagcatttgattttttgatcgccgctttgtttgttcttattattcaatctttgctgaacagctgcaaatgccgccgaagacaggccgccgccgatcagcgccgctgtgcttcttttatttcaaaaacgatcactccaaatatcccgttaatgagaaaaaaccgcagcagcttcatccttctattttccctttcgtctgctgccttgcagattggctgtacgttcttaaatcccggacgaaaaatgtggcagcggctgttccggcatataatacagcggcagcgataaatacgcttcgtaccccgatcaagtctgccaaagcccccatgatggcgattgttatgatagaccatgcagtcaaaatggtatttttggcggcggtaaccggtgcacgctcttcatctgtcaacgtatcttgaaggataaccgtctggctgacgtctcttacttgataaagcggacccatcatgatacagaggatgaccgaaaggaggggatttgacgaataggcgaataaaagcgttgtgattcccattgaaacagaacccaagacaatcatgaggccaagcctttttttgagctggttggaaaagagcacagcgagaatgccgcccaaaatcgctcccaaaaaataaccggcattgatgaatccccaccaagcctctcctttatttagcgcctctttagtaaaagccagcaaaacggcggaagtccagactgcatttgctaaaccttccgacatgtccatcatcgtaagcagcaaaacggttttcttcctgtaaacagtgcgccagaccgattgtgcgcgggctttttgacgagggataatcgcttttttgaaatccggcaatctgattaaaagccctgatatgaaaaagagtgctgctgtaaacactgtcaacgtataagtctgggccaaaacggttaaaaagccgccgagaccccagcctgccgcctggacaaactggttgaccgttacgatgcttcccgatgcagccacgtaatcgcgctttttaatggcttggtacagtaaacctaactgtgcgggagtataccaggagccgacaaagctttgcaaaaatagcagcagataaatgatataagagggtaagccaagcgattggcataagccgatgcataatgcacagaccgctctgaaccatgttgaccaggccgctgtttgcagcagatcgagacgctgaatagcaaaagcagcgatcgctccgaatacactgccgaacgaggataaagccaaaaccagaccggatccgaatacagagttcgtttccttaaatacatcgaccatgacaatgatcgtcatcaagattgatccgacagcctgcgctgtttgcgacgcccatatgtatctaaagtttttttgtttccagacggttatgccaagagaggaagaatacacgattctatcattccagtcgacttgaattgtcatctattttaccatatgtatctataaatgtttatttctataaaaaagaaaaccgccctgatcgacagggcggctgcagaagctcatgtcgagttattcgcctgtatgaatccagacgctcttaacctctgtatagttatccagagcgtatgagcccatttcacgtccgagtccagactgtttgtagccgccgaatggggatgcggcgtcaaaagcgttatagcagttgacccaaacggtacccgcttgcagacggtcggcgatatagtgagcgtttttcaaattttccgtccatacgcccgcagcgaggccgtattcactgcgattggcccgttcgatgacttcatcaaccgtttcataaggaatcgccgccaaaacaggaccgaagatttcttcttttgctattgtcatctcatcctcgacatttgtgaatacagtcggagaaacaaagtatccctgttcataagggcatgttccgccggccgcgattttcgcaccctcctggcgtcctttttcaatatacgagaggacgcgttcgtgctgttctttgctgacaagcggtcccatttgcgtgtcttcatgaaggcccgcaccttggcggagcgatttggaataagcggccatttcatcaacgactttgtcatattggtctttatggatgaaaacgcgcgatcccgcacagcaaacttggccctggttgaacataacgccggttagtgcgcccggaatcgctttcttcaggtcggcgtcagggaggatgatattcggcgactttccgccgagctcaagggtaacacgtttgaccgatttggccgctttctccattatctttttgccgatttcagttgaccctgtgaatgccagtttgtcgacaagggcatggtcggtcagagcttctccggccgtctccccaaagccagggatgatgttgatgacgcctttcgggaagcctgcctcatcgatcagctcagctaaatacagagcggaaagcggcgtttgttcagccggttttaagacaaccgtacatccggctgcaagggcggctcccattttccacatagccatcagaagcgggaagttccaagggataatttgcccgacaactccgacaggctcatgccgtgtatagttaaaataaggtccgttaacaggaattgtctgtccggttattttcgtcgcccagcccgcataatagcgcatatgttcaattgacagcggaatatcgcctgcggtcgtttcgctgatcggctttccgttatccagcgtttcaagctgagccagttccgttttatgttcctccatcagatcggcgagtttgtacatcagccggcttctttcggcagggttcatcgtccgccactcaccgcggtcaaaggcttcccgcgcagcttttacagctttgtccacatcctcgggacctgcttcatataacgtggcgagcgtttcaccagtcgccgggtttggggtctcaaacgttttgtttgaggcgctggctacaaattccccgttaatatagagcttctttgttccctgcaaaaatgactccagcttcttactgacctgcatcgttaatgaactcatgtttgtcaaacaaacctcctttaaaattttggtctgtcttcaggtgagttgtcttggtgctggtttgtcttttagttcggtcattacgcggatgaaagagggatatatttctgattttggaactatacaccaccattctataacagggaatgaaaccaaatcaatattcatgtttggcaaaaaccacattcgccgacagagcgcattgcatttcggcgaaaaaacgctacaatggaaactatacacgtatgaaaaaggagacatccacatgattcatgaaaaatggcagaacaataaaaccattaaaaaagtaaagtgcatacataccgatgccaaaaagtatatcgtcaacagagcgctgaccgtcggtaacatatacgaggtcaaaaacgaaacgggagaatttttgtttatcatcgataatacaaacaaagtcggcggctattacaaagaatactttgaagaagtaaaagcctgaattcattcgcataaagtttcaacaaaaccgaacactttcataaaaaatcggctggctgaatcggaagtgtgaccaagtgccgacgtacataaaaggcataataacgtcagaggagaaccgcagaagcagaacatcttgctgcggttttttgctgtatccgctatgcaccttttgattcatagcaaacgaaaaataagctgaaaaaactgatgaaaagttgaaacctcacgcgtccgccgggcgtattaattgatagtaaaaacaaacatatagagttaaagaaatgtaatctgctcgtaattgtttataaatcagggttatcgtatccttattattaactgacagcatactttgccttgtgcataaacataaattggacacatagaaagaggggttttgaatgggcgttttttcagcaagcaaaacagcagacggcaaaaaatttgaaccgctgcttatagaaggagaaaaaattgaatcggtttgcagactaagaatggatcaaatatgttttacgaacaagcggattattttttttgataataaactgttttctaaaaagaaagtccgcgtcttcctgccttacagatcgattgaaggctttgcgattagagaagtcagcatgttcaatccagacagttctctttctctgatgaccagcagcaaaatctttgatctggaatttacgaaggataccgacatgcttgaaattcaagcgctgttatcaaaatacttatgtgcataatctcaacaggctgttcaaacgctcctttgcgaatgaacggtctttttttgcggagaaatgcacgttttcccttttggcaatcgggtaatgaaaaagaaaggaggatgatcaacatgccattgacagaggaacaaaaacagcacctttacgataaattaatcagcttaaaaaacgaaatcacaggtacaaagtctgaggtgcagccgatgaatgaagaaacaggcgaattgtcaaacggtattgacaatcatcttgccgaccatgccggcgtgtataccgaacgaatgagggaccaggctttccggcaatcggacgatgctttgctgaaagagatcgaagacgctttaaataggatgaaagacggcacatacggcacgtgtgaaacaacgggaaaagaaatcccctatgaacgccttgaagcgattccatatgcgcgaagaaccgccgaagctcaagcggaagcagaagcaagacaagaagaccgcacagagaatgatcggcaatttacacggcaaatgaaggatttgacgaataaagaaacgatggaccaaaaacattcatacgtctatgaacggcttgaccaggaacaggactccaaataaagcgcccaatgggtgctttttttggttagaaaaataaatgagttgactttctatttaaatgaaagtaacatactatttgtaagtaaatattaaaacgttagcaacgggaggaaaatagaatgtctaaagtattgtttgttaaagctaatgaccgtacagctgaagaagctgtatctgtaaaactttatgaagcgtttcttaacagctataaagaaaatcatccaaacgatgaaattgtagagcttgacctttacagagaaaacccgccgtacctaggcagaaatgccattaacgggacatttaaagcaggaaaaggcatggaattgaacgaggatgaaaaagctgccgccgctgtagcggatcgttacttagacgaattcgtcaaagccgataaggttgtttttgctttcccattgtggaacttcgccgttccagctgtacttcacacttatgtggactacttgtcccgcgcaggagtgacgtttacatacactcctgaaggacctaaaggcctgatgggagataagaaggttgctctgttaaatgcaagaggaggcttctattctgaaggaccgatggctgcaatggaaatgtcgttgaactacatgaaaaccgtcatgggcttcttcggtgttcaagacttgcataccgttgtcatcgaaggacacaacgctgttcctgacgacgctcaaaaaattattgaaaacggcttagcagaagctaaaaagcttgcagcatcattttaattgtgaaacccttgttccaaagacggaacaagggtttttttatttatgtcgtttgcttcaggcttaataaataataaatatagtccgttggcacacccgcttcacccatttgtctcagcatcgctgaaatattgcctctgtgataagtgccgtggttgactacgtgatgaaggatttcgctaataggcgttttgatttcgcctaatattggatgggcaatcgtgatttcaccatcggggtcttcaagattttcaaaaaacgcttcatattgaagcgccgtgtcatgaaagatggaaatgaagtcatcgatctttttcctctttaatccttctttcagacgcatgcctgtttcctttgcttcctcgtaagcggctccggatatgatcttcagccataaggcgtcagccacgcacatatgggtaacaacctcagatacagtttgaaaaacgcttttgatttcccgggtgaacagctcttcaggcaggcttttcaggtgggtgagtaccctttgattcgcccaattgtgataatctaaatgctttaatgcgctatgtgtcattttttgtcctcctcacttttttatatcaattcgtgaaaaagacggatattcctttaatcaatgaaaaatgcctctggtcataaacgtaaaaaaacctgccgggtcggcaggctttcatgcttattcttcgttctgttttttagagggggtaaccggataaagctcctctgatgattcgctttgatactgcaatgaaccaggcttttctctgttttcccgttttccgttttctgtttcgttcaagacgttggcttccatatagcggtggaaaaaatattcgaacactgtgacgccgatcgctgacacgattgaagctgcagcaagcgtaccatacgggggattattttgcatggcgagaatcacccaaatcaatacgagtgaaaggccaaaatctcccattgtcgcggttgtattgtttgttctcggcagcagcagaagatctccgaccagataggatatcacacccagaaacaatgtcaaaacaaacatttcaccgaatggaacgccaaaaaacagagttaggaccacatataaaaggacaaggctcacaatgaattttaaacacaatgctcttacatgcttcatttcgtttcctcacctttcagcttattttaaagcattcctgttttgttgctgtttattgtttttgtcatcctgctggaatgcgctttctgtttcgtgatcgtttttcagctgctcaaggctgctgttttgaatacctttcttctgcatggtctcaccacctttttcactatattttggattgtttttgatttcttatacataacacgaaaaaagcaaaaaagagggttatccctcttcctgaaagccggtcatttttttctcagccctgccgcatatgcagggcccattccggttatttttgataaaatcagcgccatatcatgcggcgtctctttcatcccgttctcaagccattgctgcataacgctgatatgagcgccggttatgtaggaaatcaagtagtcttccggtacaatcggatccgttctgatcgctgttttcagccgttttaaattgctgatcaaaaccgatttgaattttaaacggaaagaacccgggcctttagggcctaaaactgccttcataaaaacttcgttttcttttatatattgaaaaatgtcgacgacgaatgtcagcggatggtcaatcacatcctgatttaatacatccattgagtgaatcgagcgtttagcaattttattgatctcttggatgatttcctcctcgctttggtccagcaaatcgtatttatcttcgtagtgcaagtaaaacgtgccgcggttaatatcggctttcttcgtaatgtccgtaacggatatctcttcaaacgctttatttttcatcagttcagagagtgcgtctctaatcatttttttcgtgcgttttaccctgcggtcttttttctgctcagtcattcaaatcctcctgacggttcatgaaaatcaacaatttccatctttgtgttgagaacttaacatttgccgattgattgttcattgcgttctccttttgcgcaattataataaacatgatgaatattaatcaacatagtgtttattttattcgtataaagaaggtatgccgcgttaggcatctgttcatggtttgagctgaatattgatgcatgtcacgctggaaaatgcggtgtaaagttgctgcaaaaagcggattttaaggagaggatagaatggagaaatacgtgctgtatttcaatgaaatcgatcaatttgacttgccctctgtcggcgggaaaggggcgaaccttggggaaatgacaaaagcgggctttcccgttcctcagggattttgcatatcaactgaagcctaccgtgcgttcatacaaacaagcggcatcatcgacagtctgttcgatcagcttgaacagctcaaacatgatgatcttgaacagattcggactgtggggaaacaaattcgtgagcatcttgctcagatctccatgcctgacgagatcaaatcggcgatattggagggcatagatacgaccggcaaagataaagcctatgccgtccgctccagcgcaacggctgaagacctgccagatgcttcattcgcgggacagcaggacacctttttgaacgtctgcgggaaagatcagcttcttgaagcggtgaaacaatgctggtcctcgctgtttacagacagggcgatttcctaccgagcgaaaaacggtttcgaccaccgctctgtctttcttgcggttgtcgttcaagagatggtttttcccgaggtttccggaattatgttcacggcggatccgatcacggggcaccgcaaaacggtatccatcgatgccagcttcggcttgggtgaagcgttggtgtccggcgtcgtcagcgctgatctgtatcagattcggtctggtgaaatcgttaaaaaacaactctctaagaaagaatcggccatttactccgtaccagagggaggaaccgtccagaaaaccctctctccggaaaaacaacaaacacaggctttgccggatccaagaatcattgaattagcagaactggggcgcaaaatcgaggctcactatggcaaggaacaggatatcgagtgggcttttgccggcggcaggttttacattcttcaaagccggccaatcacatccctttacccggtcgtacgcttttttgatgataggccgcacgtattgattaattttggctacatccaaatgatgaccgatccgctgaaaccattgggtgtatcggttatcagccaagtcctccgatttttaaaaaaagatccttcggcacagccgattcttcgcgaagcgggaggaagagtctttgccgatattacgggtgctctctccctcaaattcgtccgaagccggctgcttaaagtattgagcggcatggatcagttgatggcatcagctgtatcggaggtagtcaagcgcaaagaacatcagctatattccacatccacaaaaggcatttttcatattgccgggaatttggcgccgattttgattccggcagcattaaaagttgccggaatcctgctcatgagaaatccggataaagccgagaaaaaagcggaattgatcattgaagcgatcgtgacggacaccgaagagcagcttagccggacttccggtgctgagacgatccgcgtcatccaaaaaggaatgggaaacatgttgcaagacgtgctttcaaaagtcgctgtgtatgtcttgagcggaatgattgcagccggattgctcgaaaaaaagctgaaaaagaagctgggggacgagaaaagcgctattttgctggggaaattgtataaattcctgccccataatgtcacaacggaaatgggtctagagttaggagatctttccgatcaggcgagaaagtatcctgctgtcattgactatttcaagcgtgcaaacagcgaaaattttatggaagaactgctcaaaatccccggcggcgccgaaatgaaacgcagtttagacgattttctcaaaaagtacgggatgcggtgcgtgggagaaatcgatttgacaaggccgagatgggccgaggccccggttcagctcgttccgtccatactcagccatattcggacgattgccgccggggaacacagaaggaaatttaaacaaggtgaaaccgaagcggaagaggcaaaaaaggagatcatctctcaatttcgttttccagaaaaaaagagagtctcccggctcgttcatatgtaccgaagcttgatgggaatgcgggagcatcataaatttacacttgtaaaactgatgtttttatacaaaaaagcgattcttaaagaagcccgcaccctcgttggaaaagggattttgaattgtgaagaagatgtcttttactttacgcttgaggagcttatcgccctattggagaatcgcggcatcggggatattccggaattgttagcagacagaaaacggcagcatacgtccaatcaaaagctcacatctccacgcgtgatgacgagtgaaggggagatcatcacaggaaagctgcgaaatgaaaaaagtcctgaaggcgctctcacaggtacccctgtttccgcgggaatcatcgaagggaccgccagagttgcaaagagtcctgaagacgcgaagctgaatcaaggggacatattagtggcgccgtatactgatccgggctggactccgctctttacttcagcggtcggactgattacggaagtaggcggcatgatgacccatggttcagtagtggcaagggaatacggcattcctgctgtcgtcgggatcgacaaagcgacagaaatcatagaagacggcgcttacatccgagtcgacggaacaaacgggtttgttcaaatattggacggcaacggctcctgagttattttaaataaaggctttatataggaaaattgatatttgatacctatacgaatccttgatataaccagaatgggaacgtgcgttcgatatcgttgtcaaggcgagcaaaaacaaggcggttattgatagaagaagcgaatcagatattatagagataatatcatttccaaagaaattgaggagaaatggatgtcgcaaaatggaattgttttagtagccagtgtatctatctttagtgatgataaagtcttgatgataaaagagaataaacctacttctgttaataagtggaattttctgggcggacgtatcgaatatggagaggacattctctattcagcccgaagggaagttaaagaggaaactggattcgacgtaaatctgattgccactacaggtgtttataattttatcagtagtacgaacaatcaagttattttatttcattttatcggcgaagttactggaggttctttaaatctcgaagaagatgaaatttcagacagcaagtggataacagtaaatgaccttgtaacatttgaaaacgaaggcttacgagaaccgaatgtaataaagcaaatcactgatagcttattaaaagagaatttacactcaattagtgtgtataatgagcaactgattaaatcgttcttattgagctgaagggatgttgaacaaaagtattaatattaaaatttaacagagctaaataaaaaaagccagcctcttgggctggcgaaatcgttttaccagcttgcttttttaacgccgggtatatgccctttgtaagcaagctcgcggaagcagatgcggcacaatttaaacttccgaatcacggaatgcggtctgccgcagcgttcacagcgggtgtactctctgactttgaacttttgttcccgtttttgcttgacaatcattgaagtcttggccatctcttttacctccttttacatttatcgatttatataaataaaaatagattttatttttgtaaacaatttattataacatttaaaatatcatttgtaaataaattgaaaagactcgctgttcgagtcttttttgctgataaaaagcgaagactttatagcagatatgccaatcaacgatcccgttttacctcaggcaaacggcattttctatcaaaaaagacccagacctatcgtttgactgatctgccgtccctagatcaatgagtccgctttattcgatctgatcatttagattgagcggaaaataaccgatttgcatcattacgcagcggctgtaaatttgtatactggcatcaaagaaaggggggagtatagagaaaaacggtatttaaatttttgtctcattgtctggcactccactatgcaatgaaacgaagaaggaatcaaacatagtaagaaagcgctgtagaatttgacagccttgtgatctactccagctgaagaacaaatcaattcgtttccgcaacaccatttcccgcccaaacgatcaaacttgaaaacgaaaacggaatgcagggctgttcattttcactgaacctcgatgttttaaggatgagatgccgccgtgtcattgagaccgtttactaacgaagacgacggcggaaatggtaaacgcgtcacatttataagcaataaaaccgggaaaaggtgtgcaggctgcataccttttttcagcggttctacctttggctgaccgctattttaagcccgatcaaagcgaacaaagacccttccagcaaatgaacttttttggcggcttgcggatttctgcgcagccggtctccgactttttccgcaaacaggctgatcatcacaaagatagcgaacgcttgaatcaaaaataacatgccgtaaacaagcatttgcgttgtcacattgaaggtgccggggtggataaattgcggaagaaaggcaaggaagaacaatgagaccttcgggtttaataggttcatcaccacgcctttttgatataaagccctgcggttcaatgaatctttggcttcaacgttgaaaccggcgcttttttgccgaaaagactggtaagctaaaaacagcagataggctgcacctgcatattttacaatcgagaaggcgacagctgattgatagatcgcagcagaaatgcctgctgcagccgccgtgatgtggacgattagccctgtgcatagtccggatgcggttgctatacccgccgattttccctttgatatgctctgtgccaaaacgaacaggttgtcagggcccggcataagtgttagcagtacggccgcacccaaaaaagaaacgatcgatatcgcgtccatctgtccagctccattttcaatagtatttttattattatagcatctgagaaacactttttagcaaaaaggcggggaaaatggacggatttttagtttcttgtattagtacaagtttgtgctaatcaacataatctgatagtgaagaatgaaacctaaggaagggagaagtgcttatgtcttactgcaaaccgcgcgttctgccgccagttgtgcatcctactagatactgtgaggatcacagattctctaaaacgatcgttcctcacatccatccgcagcatattaaaaaagtggatcatcataaatacgaacatgttcactattatccgcactcttattcaagctataagccggtttatcatgaccactcttactgcggtaaaccttgcgatcgctacgaaaaatactaacctttccggaagaaaaaattcttcacatgaaaaaaggccgtagaagcgtccccatggagcttttacggcctttttggttagctcctgcatccttgcaaattcccacgcaaaacagcttcgccggcctttttcgtcttcgaattgaaagggcgcacttcgacttgggtattcacagtcagctctgatgatatttcgtcaaatttgcccgcccaaggacttccgccaaaccagctcggcgcgtcttcttggacttgatgcatggtgaaacgccagctgatctggtcaggtatccgggcaattccttcaaattgatcataatctccaaatgaagcagggtccggaagccaatcagcgtagatgccgacactctgcctttccctgacaggactcccgggggcttcggtatacggtttcttcactttcgcaattaaagccgttccgcgggcattgggaatatctcggactggatcaagaacgacgctgcatggataaggtacttgtgcgtaggccgctgccgcaggcagaatgaggacaaacgatatcgccagacttctcagaagtgccatcattgaacaaccctccgtttcttgaaatagtttaaccagtcacgccttttcaaattcttcatgttcagccctcggagacattcacctatttacatcttgggagtatcttatggtaaagacatgatcgggggcgacggcatgggatattttatcgaggcagaaccaagcgttaatctgtacgttgaagacatcaatcctcaaagcggcaaagccattgtatttttgcacggctggccattaagccatctccagtttgaatatcaatttgacgatctttcgcgaaagggataccgctgtatcggcattgactggcgtggattcgggcgttcggataagccggcgacgggctataattacaaccgtttggctgatgatatccgcgctgtcgttgaggcgcttcaattaaacaacttcacgcttgccggtcattcaaccggcggcgccatagcactccgctatatgtcccgatataggggcgctggggtctcaaagctggttttgatcgatgcggcggcgcctgtgggatttactgaagaaacggcagccaaattgcttcagcaagcgtctaacgatcgtcccaagatgatgcgcgaagtgaccgacacgtttttctttcaatatattacacaaccgttctcagactgtttttttcaattgggattgcaggcggcaggctggtcgacaaaagcggtcatcgaaatgctgagagatgagaaactgtatgatgatccggaaaaagtcgctgctccagccttaatcattcacggtattcaagacaaggtgattccgtttgcacaagcaaaggagctcagccgcaaaatcagaaattcatatcttgttccgtttcaatacagcggacacggtccattctgggaggaacgcaaaatgttcaatcggattttaacgcaatttatcggttgattttatattgaggagctgccacataatgttcaaaaagcagagaggaatattttggataatcatgttatgatgataatcaccgagactgcttctgcaccctgaagcgtgaaaaatacccgaagtgcaagtatttttatcggggtgtatctccgtttggcacagaagcagaggggagcatgacgtttctgagggggaatggaatttaatgaagtcaatccaatcaatcaccgttcattcaaagcaatatatcgtcggtgagcgatgccatccgccaggatttagagacgaagcgaccgtaatgaaaattacagaaaaaaacaagttctatggattaatcagaggctttgttgttcattttgatacaaaaaaagagctgcatattcatacagagcccgtcaatgttcattggaggtgaaggactttaagcgaacatttaaaatattcgtttagtgtcttttttttaactctggaagcaatgggattcaaccgcagatgcttcatagtcataaaacagattttccaaaaacgatatttagaaaatgaacgggcgaaattagggacaaagcataggtgcttatgcagtcgggctttagcttttcagcataatgtactagtgaatctataaaacaaagggaaaggagaatgtacgaatgtattgcaaacatcatgagccgcatgtttaccctacgaaatattgtgaggatcatcattactcaaaatctgtcgttcctcatattcatccacagcatacaaaaaaaatagaccaccacaagtatgaacatgttcattactatccgcacacttactcacatcataaagatgtttcacatgaacactatcattgcggaaaaccttgcaaaagctatgaaaaaaaatcggattacggccattgctattaattaaggcttaattgtactttcacagaccatataaatacccggcaggggtcttttatggtctgttcctattttataagggagctaccatgtatatcaacgtttaacataggttatagcgaacagcagaaaaatagtatatggcaaaatgaaaaatgcagacgaagttcgaagtcgcggaatgcttattaatgtcatttataccttttttatattaatatggtacatataggatgttattttctctaatcggttgggaagaaaggagagccgttatgcaaaaaacgctttttcaaaatgctacgattgtgacgcttgatccgcagcttcatacgctcgaaaaaggggacatgctgattgaaggctccgtcattctggacgttgccgagtcgattgaagccggagacgctgagattgtggatgcctccaatatgctgatcatgcctggatttgttgatacgcaccgccacgtatgggaatctgtgatccgcggaatcggagccgactggtccctgcaaacctatttaaaccggatttattatgggaattatgggtcgatgagaagacctgaggatgattgggccgcgaactatttaggagcgcttgaggcgctcgatgcaggcgtcacgactttgctggactggacgatgattgagtcgcctgatcatacggaccagctgattgccggactgaaagacgccggcattcgcgcagtattcgcctttggaacatctggtgacgccgaatattgggacagagacagcgatctttcgaatatggacgaagcgaaacgggtaaaaaaagcatattttcaatcgaaggatcagcttctgacgatggggcttgcaattcgaggtccggagttttcttcatggaagacatctgtctttgaaatcgaaacggcccgggaactggatgccttatgcagcatgcatattgcttttggcaactggggagcgaaagatcgttcgattgaaaagctgaatcaagccgggctgcttggtcccgatttaaacatggtgcatgccaatgcgatgagtgaagaagaaatgaaaatgcttgcggctcacggaagctcgatatctgtgacaccagaaattgagatgatgatggggcacggctatcctgttacagggctctctctaaaaaacggggttcttactgcgcttggggttgatgttgtcacatcgaccgggggagaccttttcgcacagatgaaatttgctcttcaagcagaacgcgcaaagcacaatgatgaactgctgagagaaggaattatgccggggcccgaattgagcatatcggccgaacaaatcctgaaagcggctaccattgacggggcgcgcgccctaaagctcgatcataaaatcggctcgctttccccaggcaaagaagctgactttatcatggtgaaaacggacagcgtcaatttgctccctttcactgatgcggcgggggccatcgtccaatgcacgcacaccggaaatgtagattccgtatatgtcgcaggaaaagcggtgaaacgaaacggccggctggttgatgcagatcttgaaaaggtgagacaaaaagcgctggaagcaagagatcatattttattccgatcccctgagggcgccttttaagaaaaacagtttcatgatgcgcctttgcaaataagaccccagattggttatgcgaaaaaacggatatctgaccaatgaagtaaaggcctcatagacagccgcgtatcatctggaaactaaaacgttaggaaacagattctcaaatgctaaaaagaccagcccttgatataaaggggctggctctttttaaaataagtcgtcaatttgggataagtatatgtctacagtagagtcattcaacttctctaatatcaccaagatatcgcggactgaccttcttgtttgttcatcctcaaacgttaaatttttatagtaagaaatgacggcttccaaagcgccggcaagtgccaaaccagtgtcacggtctgcttttaaagcggattttttcatttttgtcaaaagccattttaaatcatcaatactttcaatagggtagtaattaagctgatgcagctcggctgccgaatttttagtcagaatttgttcagcttcttcttttgtaatggcatcttccggatagacatagggaatgtcaggatgcacgccttcgataagctggcagtcgtcatcatccatgggattatctgtataaagtttagagagaaattctccaaatgaatccgctaatttataattctcttcaaattctgaatcgaaatagtgcacgggcggattttctttcgtttctctgtagtcaagcgctatccatgtatggccgtcaccgtgaataaggatcaggttgtcgggcagttcccattctttaatgatgtatttgctctcgagaatccctgcctttttccctaagcctaataagtagtcaaactggacatgatctttagcccaggaggtaggccgttcagaagggaaggcgttaaaattgatatacccgccgttttgttcaagaataagcgctttgtattcctccggaagtttcacacctaactttttttcagctttttgaatatctctctctgatatgctttttaatttgtatggatcttcgtcttcgtatgtccaaaagtttttcaaatgcgtcccccctcatccgtttgttgttcgtatctatttggcaaaaagggttgtccttcccggagtctttttgaaggccgagaaataatcataagtttgcggaatggccccgtatgttcctttaatgcgaatatccttacattcgccttcggaattttcaaaataaagcctgtaggttcgaggcatcaacgtgatgacatcctgagcggttcggtcaggccagtccccttcaaaatctttaatgcttaaactcataaatcttcctgataggtgcatcatctgaatcttaatcgttgttttgcagttttctgcattgaaaatcgtaaacttatagccaatatgccagttagaaacgtttaagtcgctgctatcgggaatgtcctccacatgagtccccgtaaacgttaaattcagcttgtgcgggaacgaataggcttcagcgcggctcacaaaactgaaaaatccacaaatcaacaccatcatcagcaaaaagcgtttcatttaagatcccctcctttttccatttccattgtagcatagacgagttgaaaaagatggaaattttttcagaggataagcacaagccgaaaactaaatcactccgcacggtttgttaggtttagcagcctcttgaatatggttttaattaccgtatatatatcaattgattcaagggaaaaataagatcagaccttgaatcaggctaattcctcgatttttttcatgggaggagcggaaagatgaagcttagcacttataagatctgctttttattccctatcataattctttttttagctggatgctggagcagccatgaaattgaagaacttggcttgacttttgctatagggtttgatgaaggccgagagacagaccttgaaaaaaaatttaataaaatgggcggggattatccaaaaaaaaatcgagtaaccttgacataccaatatgtcaatccgtacacagcaggggctcagattgccgtgggaagcggcagcagccaacaaccttacattaacgtatatggaacgggtgattccttacagcaaataggcagtgaaatagcactcaggcaggacaggccggtcttcagctcccacttaaaggtgatcgtcattgctgcggatttgcttcgtacttattcactaaaggaattgcttgatcagacgcttagggacaatgaaatcagactgagtacgcttgtccttgtaacaagaggaagagcaagtgatacacttgaactgaaagacggcaccggtaaaatacccgcatttcaccttaccagaattattcacaatgactttagggcgaaaaaaattctgcctccgatcactcttgccaaactgccgggcatgatgaaggccggaaccagttatttgcttcaaaacatcatcggtgccgacggggaagtcaaatatgcaggagctgttgccattaacggaaaaacaaataagctccttggttttttagatgaaaaagatttagacgggatcatgtggatcaaaggacaaggggtagggggcactgtcaaaaactatgatcaaaaaacaaaaaaattgacggccatgtcagtcgatcaccttaagagtgagatcaagccagtcttcaaaggaaaccgcctctcatttaaagtgaatattaattcagaggcacacctggctgaaaactggaatacaaccgaaacggcaattgacaaaaaatatttgaaaagaaaggaagaaagtgcgtcacaaacagtgaaacagctggtagagcagatcacagaaaaaatgcagaaggaatataaagccgaccttgccggcttcggtgatgaagtgaggatccactatccctttctttggagaaagctgaagaaaaattgggatgaagtattcacagaaacccccattcaatatgatgtgaacatcacgattgaagaatttggatcacaaagtagacattagcttaatcatgactttataaaggtgcacaaataacagcgaggggataacggggaatgggtgagaatgcttggtcataaacggtaagtgtgtgttttatcaaacttttttcgcggataagttatatatatatagataggctgtaaaaagacaaatgtcatctgatcaaacagacgcatttttataattcggctatagcttttggagttgaccgaataattgattagaggacagtcattttttgttaatttcaaacggaactaactttaaagagttagttccgtttgaatcgctaatccaaattttgatcgatcgttccttcaaaatagtcatcactgacctgttcatgagtttcagctaatcctttttccaattgagtagccccttcataatccgaagggtcgaaatattttccggccacatcggtagtgtcagttgtgttttctttgttatcagtttcagtgtttacgttttctgtcttagcattgctgtctaaagattgctgagaatcatattccttgtctagtgaagaaaatcttttgtaatcatccggtctgtctgctccatttttttgaggcacgttaatcactccatatcagtgaaattttgttctttaggtaaaaaggtcatctgaaaggcatttcagtctcatattcatttctcatttgatcaatacaacgatttcactcctttcgcccaaaatatggtggaataccaactcttcttattctgtctgttgagaaggtattcattcgctttttttcgagtgaatcaaactgcaagcctattcaagggaagagaacaagtgaaagaaggggcgagaactccccattcagtgatttaaggcttcaattttcttctgttacaagcggctgacggaaggggcttattcgttaggcgaacacgctggagagcatgatacctcttctggggagaaaagcggaaatgaaccaggcaaaggagcaagtatagctgcttctgatttaaccggtgaagcgggaaaaagcgaattgaactctggaaccaatcttttcatgcctgtttatgcttttttgtttctatatgatgaaattgtcgttttcaatgatgcatatgaaccaatagctgcgcaaccatagaatccgcccataaatactccagctatgaggctgtgtcgatgacttatgcaaacagatatgattaagcctagtgcaagtgcaattgatggaacatactttttgggaaccttaagaaagattttaattatctgtgtgacgatcaaaataatcggcactgccgtaacagcatcccaaaagtttgtatgaatgattgggaaatccatatatagcaccacctttttttatcagtatttcttgattcggtgaaaaatatttaatgcgaacacccagggatctcataattcctttggaaagggatagtgaaccacctttataaactgcaagagcattttactcacctaaaatcgacctcattaatctatagttcttaatctttaccgcagattgctatgtgcggtagtcagaacgtctttttcgagtaaaaagcagcgattgttaggcggcactcgtatggattataatgtgaaaagagggaagcctcatctgtattgaaggggggatgtatggagtctaaaatgaagatcggtttaggtgttttgataattggactcggctttctcagtcattttcgattttcgaacaacaatgatatgaacacagcttcaagaaacaccacaagcgcacccagtcacgattttattgtttagcttaaaaaagagttttgaattatctttttgcagccgtttcattagcggcttttttttattcaaaacaggtttattggactggtcttaaagattcattttgttggattgaaaggatttattcaccaattcccttccgtatagtggtaaactcttagttggtcattacttttgtcatgcattttttgggaagcgaggtattgcaaatgatcggttcaatcctgggagaaacgctggctttagatatcatgaaagttgatttatcgatgaagaaagaatttttggcagagctgaaagcttgccgcaaagagctggaaaaagacaaaacagagttctctgattcgaaaaagacgatcaccgaaccacaactgtcgtctcatacgtggcaaggcagtcttgctgactcctttgaccgtattcgaggtctgatgaagactgcttacaatgacataagcggaaaacagctttctgatgttttaagcaaaatcgatgaacgaatcaaatctttacaagaagatattcactcgctcagccaggaagttcgttctttagagaaaaagattgagaacgcgaagcgggaagcacgagacaaggagtaaatgaaaaatggatcaagaaataaaagtgaataccggagaagtcaaacaagcgctctctaaattaaagcattccagccattcaatgaaagcgacgattccgacagatatcaagggccagaatcaccttgatgcgacaaagaagatagaggaactgaatcagacgattaataagatcgcttcttcctatgcctctgctttctcaaaacaagtcgtccaaacggaatcagcagtcgaagcaatgatggacaccgacaaacagctggcttcatcgatgaaaacaaaatagaagagaaagccatgaagacattggatgttcaggcgctgcacaaagcgctggaacatttaaaacatcaatcagacgaaattgctaaagtcaaaagcaaaaaacatattatatatcgactggaatataatgttatttatgcggaaaatatattagaaaaaatccctaatgaactaagagagttttatttaagagtatgatatggttttatttgtaatcttgataaaactcatggagatagagtaatggattctcatagtgtagctgattttatagatccaagaattagagaactatacccatgttagtgttttttgaagtcggtgaggggacatatctgactctagatttagatcaggaagaagagaacggtatttgtccagtatactattttgacaagataattgcggcatcactcgaagagttttcaagaaaatggatgaagaagaaccagactattatattcatgcctaaattgacttgagaattgattaactttgaagaatgaccttgattggctattgcctttcaaggttttttatatttaatccgaaaaaagggcatagaatgggagacacacctatccctgaactgaatgatgataagatcgtcagtctcacaagagaagcggtccgtttacgtaatttctcaatgctttctccttttcttttttaaatttatgtgtcatagtaccgatataatgattaagtagaattgaaagagtgatgtccattgttatctttaggaaatattttaacaatagaatttgaaaacgaaattcaagagtatgtcctcgcgaaaagcaaagtgctatccattgaggacaatgttttaagagtacattatcctgttgatgaagaaacagggagaactgttattattccaacaaatacagtagcaatagttcactttataaatgagcaacaagtcccatataaatttaccagtgtaatacagggacgagagatctatcaggatatacctgtattaaatatgtatttacccgaagaagatcaaatgacaaaaattcaaagacggcaattttttagagtaaatacaacgattcctgtcactgtccgcccatatggatctggttcaatgtttaaaacatatacagcaaatatcagtgctggaggcgctgcgttaattattgaagagacgcaaatacacgaagcggaagaggatttaaatttaagcattcatctgccaaatgagggacatgatgaaaatgtgattgacgtttatgctcaagtcaaacgcacttacatagatcggagaacaaacaaacagatcatgacagttgaatttatcaagatggatgaacatgatgaacaagcacttgtacattattgcataaaattgcaattggaagaaagaagaaaactgaaatctgattagaatattaattttaacctgttatatgatgcagcttacagtaggtgtcatcccccaaaagttgagaaagacctgaaatctgcctttttttctttctcgccacatctattgaaatggaaagctgttggtgagatgatgtcgaatactttgcaaatatataaagaataggaggagaagctgatcgatttgctttagaaacagaggatagtctcatctgtcttaaaaagatggtctatgctcaaaagcaaatattgaatggggaatgtttgtatgaaatctaaaatgaagatcggtttagggattatgataattggacttggttttctcagtcatttttcgaacaacgatgatatgaacacagcttcaagaaacatcacagcgcaccctccagtcatgattttgttgtttaacctaaaagagtttttggaatatccttttagccgttttaatagcggcttttttttatgtatttcaaaccctcaacaaaggtttaatgacctgatcccaaggattcattttcacggattgtcaggatttattaaccaattcctttccgtaaagtggtaaaacagttcgtggtatgtcactttagtattagaggagaatgctatgaaaactcttgatgttcaggcgttgcacaaagccattgatcaatcgaacttaaatcaaaaatagataataggactattactcgagaagaatacaaggtatatacttggaataagaaatttgcagctaagcgagataaaggtgctaagactttttaaacaagaatacttaatggtgaagctccaacaagaaattggttcaaaggagcaggcgcaagatattataaacaataagagagcaaagtatgaagggaaaactatgcaaggacatcacagttatagcgcttctaaattccctcatttaagtgacaaaggtgaagttatatatccagcaacaacaagtgaacatttacacagatggcacggagggaaattacaaaaatagccttccgggaaagccgattaaggatattaaagatttttaatttagaggggagttatcttgatggacttcatttatgtggaagtactcaatgattcaaatattactaagtacatttcgttattaagaaaaacatcatctaaacctattaacgaactaaagcaggcgattgaaacaggaaaaccagttattgaatgtgattactatgacacagaagaattgaaatcactagtaatcattatagaacagttactctcattgggagctagcattaaaatttatgaaaatgatagagaaataacacttgagatgtcttgatcgaaacctatgagggcattgcaaaagaccgagaagaattggatgagttattatttggtgatgatgattaatatttaatgaagaatgagttgaaaatataaacaatattcaccttttctaccttgattggcttttggcctttcaaggtttttttatattcaaacccgagaaaaatccgacaaaaagggggataaaataggggactttttcttttccactttgtcatacgatagagacaagaaaacgaacgtggaatatcgagtccaagacggagagcctgcggacactgatcttttgcatacggatgttatgcggctgattggtttgtgttttcagagagcgaggttgcttgagttacggggtttgccgatgttgaaaaggacgctgctccaaagccggaaatagagcttgtcaatgctggtgccgcggttagaacaggcattgtttttcatgctgatccctcctttttcatctatcctctcgtttcccggtgatgaagcaataaaacatgtgagtgcgctttgtatgttttattgctcccttgtaagggaagagaaatggataattcggtatatacacaagcaagaaaggggaatggagatggctgaacagaaaaaaatcacaataaacggcgttgaaatggaagcgtccgaggaacagacggtgcttcagcttttgaataacagttcgattgaagtgccgcaaatttgctatcatcctagcttagggccgattgaaacatgtgatacgtgcatcgtcagcatcaatggcgagctaaagaggtcgtgctccgctgaagtaaaggatggagacgtcattgatacgctttcacctgatgtgaaaaaagcgcaggtcattgggatggacaagattttatataatcatgagctttattgtacagtttgcgattacaacaacgggggatgcgaaatacataatacggtgaaggaaatgaaggtcaatcaccaaagcatcccgtttgatcagaagccttaccataaggatgaatcaaatccgttttaccggtacgatccggatcaatgtattttgtgcgggcgttgtgttgaagcgtgccaggacgttcaggtgactgaaacactgaccattgactgggagcggaaacgcccgcgcgtcatttgggataatgatgtgccgatcaatgagtcgtcgtgtgtatcatgcggccattgttctaccgtctgtccatgtaatgcgatgatggaaaaaggaatggagggagaagccggatatttaacaggaatcgatgacgaaacgctgcgtccgatgatcgagatcacaaaaggcgtagaaacaggttacggctctattctcgccatttctgatatggaatccgccatgcgtgacgagcgaattaagaaaacaaaaaccgtctgcacctattgcggtgtcggctgcagctttgatgtctggacaaagggcagagatattctgaaagtcgagccgcaggaggaagcaccggccaacggcatttctacttgtgtaaaaggaaaattcggctgggatttcatcaacagcgaggagcgcttgacaaagccgctgatccgcgaaggcgaccatttccgtgaagcggaatgggaggaagcgttaacgctgatcgccagcaagttcacggatttaaaagaggagtttggcccggattcacttgcctttattacatcttctaaatgtacaaacgaagaatcctacctcatgcaaaagctggcgagagggatcatcggcacaaataatgtcgacaactgctcgcgctattgccaatctcctgcgactgccggcctgttccggacagtgggctatggcggtgactcagggtcgattgcagatatcgcgcaagcggaccttgtgttgattatcggttcgaacacgtctgagtcgcatccggtcttgtccactcgcattaaacgggctcataagctgagagggcagaaagtgatcgtagcggatatcagaaaacacgaaatggcagagcgatctgatctgtttgttcagccgcgtgccggatcagatatcgtctggctgaatgccatcgccaaatatttaattgaaaacggcaaggccgatgaacgctttttgcaggaaagagtgaacggacgggatgaatatgtgaaaagcctcacgccgtatacccttgaatatgccgaggagaaaaccgggattgatcaagaaaccctcatccagatggcggagatgattggccaggctgacagtgtgtgcgcattgtgggccatgggggtgacacagcatattggcggaagcgacacgagcacagcaatctctaatctgctgcttgtgacaggaaactacggaaaaccgggagcgggctcttacccattgcgcggccataacaacgtgcagggagcaagtgacttcggaagcatgcctgacagactgccgggctatgaaaaagtgacggacgaacaagtccgccaaaaatacgagcaggcatggggtgtaccgctgccgaaggagccgggcatgaccaaccacgaaatgatcgaaaaaatccactctggcaagctgaaagcgatgtatgtaaaaggtgaagaaatgggtctggtcgattccaatatcaatcatgtacacgccgcatatgaaaagcttgatttctttgtggtgcaggatattttcttttcacgtacagccgagtttgccgatgttgttcttcctgcgagcccgagccttgaaaaagagggaacctttacaaacacagaacgccggattcagcggctttatcaggtgtttgaaccgctgggcgaatcaaagccggattggcagattattatggaagttgccaataagcttggcgctgactggcactatgagcaccctgctgacattatggaggaagcagccaagctgtctccgatttatgcgggtgtcacctatgaacggcttgaaggctacaattccctgcaatggcctgtaagcgctgatggaaaggattcgcctttactttttactgagcgcttccctttcccagacggcaaagccattctctatcctgtgcattggacagaacctgaagagttcggagaggaatatgatatccacgtcaacaatgggcggctcttggagcatttccacgaagggaacctgacctacaaatcaaaaggcatttcaaagaaaacaccggaagtgttcttagaaatttctcctgaactcgcggcagaaagggggattcaggacggaacccttgtcagactcacatcgcctttcggaaatgtcaaagtgaagtgcttgatcactgatcgtgtcaaagggaaggaagtatatctgccaatgaacgattcaggagaagcagcgatcaacctgttaacaggcagccatgctgataaggataccgatacgcctgcgtacaaagaaacatcagccaagatggaaattttgaagcgcgacggaagcaatccgctgcctaagatcaatcaccgcaacggcaatccgcagccgcaaatcggtgtgcaggtacaaaagaaatgggcgcggaaggattatattttccctggcgacgctgtgaaaagggggattgggcataatggctagagcgattaaacgaattcagaaaatcgagataaccgaagaggaccagagaaagcgtgatatgaaagaaatagaggatgcattagtcgaaaataaggaagccattcttgaaatgctgcatatgattggccacatgaacgagcgtggtgtattgccattgctgcgcggcctttttggccaaggagataaagttcttgacatcttagtgaaaaaggcagatacagaggaaacggccaatacactgaaaaatctgcttcttctgttcggaacgcttggcatgctggatgtaaaacagcttgaacctctcattttgaaagtgaatgcgggggtggcaaacgcggtggaacagaaggacagcgaagagaaaacaggttattttgatatcatccgctcgctcaaagacccggaaatcaacaaagcagttacgctgcttttctcctttttaaaaggaatgggacaagatacaaaggagctggaacgcacgactcagcctccagagcaccaaaaacatcatcaggaaccccgagagaaaagggggatgaataagagggattgaccacccgccccaggtgtactcctaagggagtacagacacattacaactggtatatcatccgtttttagctgatacaaatagcagtaatactgaagagagagttaaggacgatattgattacttggtgaagttagattagaagttgatttacagttgcacgttttcatcatctggaaacgtgcttttttaatagcggaaaataacttgaagggataaaaaggaattcgatttgtttttttctctggactcttcaaaaaaaggtttatttgtaataaaatgtagaatcatattctgtctaggaggagaccggtgtctacattagctattattgttcttcttggcttttctggttatatgatctggaaattaaaagaggcaaaaaaaattcatcaaaacaatttagaacgtgaattaaaaaatctagagcaaacatatcaagatcacctggtgcaagctcataaagaggcttccgctgctttacaacaagctgaagtcatgaatattaatcaaaaaaatgaattcttaaatgaaaacgattttctgaagaacaagattgtaaagatggatgaatatataaacaatcttaaaaagtattcaagaaatagcggtgaagttattacccacactattttaacggaattaaaagaaaagcttatttctgaggggaaaataaatgaaaacgagatggttataatgggaaacgtatttgtaccctatgaagaaaatggggagacaaaaaccaggcaaattgatcatttagttattttgccatcagatatctatattatagaaaccaagtattggcgtggaacagttatccatgggattaatcgtaaaaatgcggaatcaattgcaaatgatttttcatttgtctttgaacaattatttccgaaagcgaatagtgatacagagaagacaatcatttttatgaaaaatagcaatatagataaggattccgagcaaaaaaattctataaatatttcttattatgataacccgagaaatcaagtcatggacacaatgtataaactcaggaattttctcataacctataataataaattcaactatgttgagcctatagtctattttggttatccggaggacaaagaaaatcgtgtaatagattattctacaaaagataagaatagatttacctcaaaagcaagtttgtgcgagtattttaagaatgaggttttaaagcctgctaaatatacagtcgatgagatacaacaaataaaaaggatcatgcaaaaagttaactatctatcataaataaatatcaatttataaagcatctcaatggatgctttttttcttggaggtcatgaacattcgtgaaattccatagaaaaattaacccggctccatacaatccacacttgcagccgggtgcttcagaatatgaaacactgaaacagtctatgaaacgcttttgaacagttgaaccgttagtctggaatgaaaggattggcaaccttgcaggcggcaaccaacgctttaaaatcctcatggaaaaaggaccaaagactctcctggtttcagttgtaaatctggatgaggctgaggaaaaataagatctgcggcgactgggatgaggaaaagctccagctgcatcttgctgaattaaataacacttttaatgacaggattttcgggagaagaattagtggagctccttttagatttctcgggagattcagaggttcttcatgttgaggaagacgattctgaatgatgaaatggcagctgatcaatttgatgaatttttaagagacgtctttcagaattactcaagaaatggaagataaagccgcgatttatgtgtttcatccttctgcctatcagatagcatttgaaaatgagatgaggagtgccggtttagacattcgcactcaatgtattagggtgaaaaattcgcctatgtttggatagaatatgtcaaaagggtttcttattgtaaaagaagtatatacggcaaagggccaaattgtttaatataaaagaaaaatgaagttgaattccaaaggaaataacaacagatcaaaataaaagccttaatattgacggttagtaaaacatgtccaccttcacatcatgactgcaaaaaattcaccattgttccctctggatcggcaaatgccgaaaatctatttgagttgttggaggaatgattcagtatgttaacaagagaagatatctttaagcacgtcaaagaaaaattcgggacatcgccagattacccatttcaaaaatttccaaactatgccgctttaagacatgaaactaccgaaaaatggtatggtcttgtaatgaatgttcttccggaaaagttaggcttagatggaaatgacgaaatagatattctgaatttaaaatgccctccagaaataagtggcagtttaagaaatggaaagagtattttacctggttatcatatggataaggaaaattggatatcaattgttttagaacgaatagattcagaagaagtttataacttaattgagcaaagctttaatttaaccaagtaaatcgtgaaattatctttcgcaaaagcaaccagaaaatattcaaacttttttatgcaaccgaaacttaaattcgttggataagaatccgttttgatcaactttattttaaagcaccaacaacacggccattaacaaaagaggcaaacccttggcatacaagggcttgcctctttacatttgaaacgtcccaggagagattcgaactcccgacacacagcttaggaggctgttgctctatccacctgagctactgggacacagaacaatattatagtacaaaaacctgaaaaaataaagaggttgcagcggtttttttcacaaatttcttcgggaaaacatacatccggcagacttcgcagcctgctgaatgtatgtttcggccttagcctttcaagtcaatatgatgtcctgaaacgggatgtggcgcctgcaccatgtctacgagctgctgtgcgctttgttcggcggtatccaaagccgtctttgtcagcgacatttgcacgttttgataaagagccgcctgactcatggccattgataaaacagcaatatccaacataaccacctccttaacatgtgtatcggttagagaggtgaggactttactcatatttactaatctgaatattcaatttaatatagttgtaaaccgatccatcgccatcttaggcatcataaaaaagaatccgcctctcaatacggaaaatgatcggttccttatttgtcccgaattagggagagtggctgttttcagttcgtttgtatcttctgcgatttctccatttcctgggcatttgtctaatggtttttgttgatttcattctcaaagaggctgatgattctatcattctgctttacaatcgttcgcaacatggcaacgatgtttcctgcaaatccaatcaaaatgatcatcagtatgatgatgaaccacatggtataacgacaccccttaatatgcaaaattttcctttcgattcaacattaccacctggtctttcacaaaacaactttccttttgaaacggaggctgattttatggattggcttgaatttgtttctgcgatggttcaatcattggcatggccagctgccttgatgatttgcgttttgctgctaaaggagcctttgtccgatcgaatgaaggaattgatcaaactgaaatataaggattttgaattggagtttgacaaaaggcttcaggagctcgtctccgtacgggaaaaaaggttatcgggactgacttctgtacggtcagcgcagcgaggggaaaacatgatcgaaagcgcttggtcagatgttcacaatgttctgcgggaaacagcctcaacatttgatcaagatgcgatccgccttgaaggcgatgaattgattcaaatgctgcatgaccgcggaattttacaagacgacgcggcagctgtgctgtcagagctatccgctctgcgccgcgatgcatctgacggagcgagtattgccggagccttggcatacaaaacgctttgccgggaggaagcggagcgcttgcgattattagctgaacaacagaccgggatttaatgatggcgagtcccaatacatttgattttctgacgctttacatctaaaaatgaattttctttatcgattagacgattttacggggagaggctgattgccggtttaaatatgatatcatgggggacaggaagaagtttaatgataagagagggtttcatttatatgctagagaaagccgaagcactattgcagcactattttggctatccttcactgcgcccggggcagaagaaagccattcaatctgtcgtttctgaaaagcgagatacagcatgcattatgccgacgggcggaggcaaatcaatctgctaccaaattcccgcgctccttatggaagggacaaccattgtgatctctcctttaatttccttgatgaaggaccaggtggatgctttaaatcagcttggaattcaagctgcgtacgtgaacagttctttaggccataacgaaatcgctgagcggctctccgtatttaaggaaggcggctacaagctcttttatgtaacacctgagcggctgacgtctcccgaattcattcgcgcgatttcccacattcatattccgctggtagccattgatgaagctcattgcatttcacagtggggacatgatttcaggccgagctacagacatattgaaggctttttaaatagcctcggcacccgcccggttgtattggcgttgacggctaccgcaacgcccgaggttcatgaggatatttgcacacagctcgggatcgaaaaagagaacacggtttttaccggtttttcacgggataatttgacgtttaaaattttaaaaggcgaaaacagggaccgttttatcgaatcatatgtggagaaaaaccgctcagaggcgggaattatctatacagcgacaagaaaggaagccgaaagaatatcaagccgcctctctcaaaaaggaattgcggccgggtgctatcacggcgggatggatgatgaagaaagagaccggcagcaggatctctttttaaatgatgagatcagtgtaatgacagcgacctcggcgtttggaatgggcatcgataaatccaatatccgctatgtgattcatgcccaaattccaaaaaatatggagagctactaccaggaggcgggacgagccggacgcgacggccttgacagcgagtgcatcctgctgttttcccctcaggacattcggcttcagcggtttttaatcgaacagtcgacagaagatgaagacattcgggcgcaagacgtgaaaaaactgaggcaaatggttgatttttgccatacggaaggctgtctcgaacggtttattctttcttattttggcgaagttccaaccgaagactgcggcaggtgcggcagctgtctcgacacccgaagcatcaccgatgtgacgaaggaggcacagatggtgctgtcctgcatcatccgcatgggagaaaggttcggaaaaaccatggtggcgcaagttctggcaggttcgaaaaataagaaagtgaccgaaaacggcttccagcaattatcgacttacggaattttaaagaaacggtctattgccgacataagcgattttatagagtttttaatcgcagatgagtacatcaaaatgtccgacgggacatatcctgttctctttgtcgccaacaaggggcgaaacgttttgctcggccgggaagcggtgatgcgcaaagaaaaaatgcaaacaaatcaaatcgttaaagatgacgaattgtttgaacggttaagggcgctgcgcagaaagcttgctcaggaacaaggcgtgcctccttttgttgtattctctgacgaaacgctgcgggaaatgagcgggaaagtccctctgacagacgaagagcttttgtcagtcaaaggagtgggagaacaaaaaagagtaaaatacggagctgtatttctacaggagcttcaagcctataaaactgagaaagaagcataaaaacccaaaatttatatatgtaaaattttttttagtaaatctcctatttcagttgaaaaacgattggaacccttgatacatctgaatttcggccgattttagggcggctgaaattcctcctcgtaaaacaactgtaatcaaaaacaaattgttttgttattgatttgacattttcatatgttacgattgctcctgttagccggacaataaaaagctaacaagggaggatttacttatgaagaagacgtttatgtcctttgttgcagttgcagcattatcttcaactgcattcggagcgagtgcctctgcaaaagaagtaacagtccaaaaaggtgacaccctttggggaatctcgcaaaaacaaggggtaaatctgcaggacttaaaagaatggaatcagctttcctctgacttgattattccgggacaaaagctgaacgtttctgaaaaacagacagaagaaaagaaacaatataccattaaaaagggagacactctctggaaaatcgcccaaaaattcggcgtttcagtgaatgaccttaaaaattggaacaacataaaatcagatatcatttacccgaatacatccataactgttgacggacaggcgacggtccaggctgctgcggcgcaacctgcggaaacaaagcctgccgtacaaaaagaagcgaaagtcgagaaggctgcgcctgcccctgcacctaagcaggaaaaagaaccggcttcccgttcaaacgtatctcaaagcactgccaaagaactgacggttacagcaacggcatacactgccaatgacggcggtatgacaggcgtgacagccacgggtatcgatctgaaggccaataaaaacgccaaggttattgcggtggatccaaacgtaatcccgcttggatccaaggtgtatgtggaaggctacggagaagcgaccgctgccgataccggcggtgcgatcaaggggaacaaaatcgacgtatttgttccaagcaaatccgcagcaaaaaactggggcgttaaaacggttaaagttaaagttttaaaataataggtttaccattgatggacactgaccatgaagatgatcagtgtcttttttctgttttctgcatctttttttctattttgatgtttttttagattggcaaatgggtagttcaatagataaatacatatcagctgatctaaaaaggagttgcagaagtattggtgtggattatcatgacatttttattgattaatgcaggaatttttattttttcttatttgaggacaaaagatattgatttaaaaacgtcagacggctattttctcggcgggcgcagtctcactgccctctatatcggaagttcgctgcttttaaccaatttgtcaacggaacaaatggttggattaaacgggcaaagctattcgggaaccatgagtgcgatggcgtgggaggttacagcaccgcttgcgctcattatgctggcatttgtctttttaccgaggtatctcagttccggagtcacgacgatacccgactttcttgaaaagcgctatgatcaaagaacgcggcaaatcgtctcgatcctgctgcttctgggatatgcgacctcgtttctgccaaccgttttgtactccggggcgctcgttctcgatcaagtattcaacatttcatccgcgcttgggatcaatacgttagtgactgtttttttaatctcgcttgtgatcggcgccgcaagctgctgctacatatttttcgggggactcaaagccgcggcctcggctgatgccatttatggcgtcggtttaattcttggcggtctgttcatctttgtgctcggaattatggcaataggagacggcagcctcttgagcggctatacagagctgacgagtgtacataaggaaaagctgaatgccattacagcggacaactctgcagaagtgccgtggccgacgatttttacaggactgcttgtgaacaacttattttattgggctgttaatcagtcgatcgttcagcgggcgctcggagccaaaaacttggctgaagggcagaaaggcgcattgctggccggtgtatttaaaacgatcggtgtgttttatctcgttctacccggcgttattgcttatcacctttacggaggccatattcaaaacgctgacaccgtttatccgaggctgatcgttgatttgctgccgactgcactgattggcgtctttgccgcgatcttattcggagcgattctcagctcgtttaacggttcgctgaacagtacgatcacgttgtttacattggatttatacaaaccgctcttcaagccagaggcaaaagaggaagagctcgtgaaaaccggaaggatctttgtggtgatcctggccgcggtatcgattatcatcgcaccttttattttgtttgcgccgtctggcctttacaattatctgcaggaaatgttcggttttttcaatgttcctgtattggctgccgtcgtcgttggatttttttcgaaaaaagtgccggcgcttgcagtgaaatgggcgatatttgcacacattgtattgtataccatctcaaaaatctatttcggccatattcattttctatatatattggctgttctgtttccgttttccgtcctcttgatgcttttcatcggaagattgaagccaaggccgtcggaattcaagcttgagaaaaatgccaaggtagatttgcagccatggaagcatgccaaacttgcttctgttcttgtgatttgcctgatggcctgcatttacctgttattttcgccttgggggcttgccaaataaaaaaggcaggggatgtgcgttcatcctctgccttaatgttttgtcctttgcgttatttgcctttatttcaccttaaagatcctgccactgaatttcgccggattttgaatcaggatcgatcgttacttcaaaatgatgcttttcgtaaaaatggatcagccggtccacatggtcccaatcccttttagcaatgtccccggtgatgacggggatgttatgctcgcgggctttttcctttaaatacttcatacagattgaaccatatccaaagcctgccggtcctttaatatccccgatatggatcgcgcgtttttcttctgtgtaggaagcgacgagagaaaaatcacacctcccgcggtacggcgactggcaatcgcttaacatgatcttgcatgtccggccatcatcaatcgaatggacaatcatccattcatcgtctttcgattgatcaataccgagcactcgcgaatctttggagatatccttcatattttcacgcatccgaaacagttgaaattgcaggtcgttcaattccttctgcaagccggagctgtctttttgcagttcttcatccgttatcatagaacttgctcctttccatttaaacatacagttttcgattatagtaaaaagaacggcaatttgcaaatgggttgctagaattaaattttaatgtaattttaaacaaatatttcacattctacgatttttttgtgatagaattcatatgacttctggtatatttacctaggatacgagacaatggatcctcctaatcccagaaaaatcatgacaaaaggagcgtacgattttgaagaaaagaattttttctctattgatgctgatgtcagcttttgttcttgtattagctgcatgtcagcaggctgatccaaaaggatcttacgcagcggcttataaaaagctgatttctgcgaaatcatacgaattttcaagtgatatcggcttgaaagttgacgcatccaaccttggtgcggaagataagcaattcgctgacatgctgaatgatgcaacattgacgatcagcggtaaaacaaatgctgaaacgaaacagtctgaggccgttattaaagcgaagctgaaagtccaaaacatgtctcttgatttcgatattccggtttatatggatgaaaagaaacaagtcggctacatcaaaattgacagcgttcttgacagcttcggcatcttccttggaacagccggcatgaattttgacagcgtcaaaggcaaataccttgaattcccgcttgaagatgacaaatcttcatctaaagacacggatgaacttcaaaaacaattgatggaatccatcaaagaagcagcggacaatctgcctgcagataagtttgaaaaagctgatctgacggataaagaaaaagagcagggtgcttctcaaaaagtcgctttcagctttagtgacaaagaaattaaagctgcggtcgtcaagttcatcgaaatcgccggaaaagcgagcggagaagctgttccgaagagcgagctgaacaagattaaagacggactgaaagacgtcacatttaaaaaattcgatgtgacatcgacaatcgatgacaaagaaaaccttctgacagaaaatgcggatatctctttctcggttgacagcaaaaaagcgcctcaatctttcggcatcacagcatcaacgacttacaaaaatatcgatggtgacgtaaagtttgagcataaaccgaataaagaagatatcgtaactgaagaagaattcgaaaaattaatggctcaagatgctatgaatttctaaggcacccgcctgtgttcccttcctcgttcaagaggaggggaatttttgtatattctgtgactaaattctgacgaaaagccgaaaacgttgacattcctcctgaatttgaatacgattttgatagcttgcacaaataggagagattgcccgatatgacccatacaaaaaaaaataaaaactacacaggaattgttgttgctctgacgattatcataaacggcgtcattgccctcttgttttttatgccgaaaagcgacaaattcgctcatttggatttgacttttctgccgcttttgaacgcagtctgcaacagcttcacattcattttcttagtggctgcactgatcatgattaaacagaaaaacattaaagcgcacaaacggtttatttttgccgcttttacgacaacgttcatctttctcgtctcatatttgacctaccattcattgatgcctgacactcattttggcggggaagggattataagaccgatctactattttattttgatcacacacattgtcttgtccgctttaatcgttcccttggcattgttcacgctgttcagaggcctgagcatgcaggtggaacgccaccgcaaaatcgcccgctggacgatgccgctttggctgtatgtcagcctgacaggcgttctcgtctatatgatgatttccccatattattaaaagaaaaaaatccgttcccttatacaaggggagcggattttttcttttagcagcttcttcaaaaataatctttcttaattggatatccgtcctacacaagatatagcaatcaccaatataaataattagagcattggatagaaatgaaaagggagatgcttatgaaaattcttcttgccacttattggagtattccgcacgtaggtggtgtgtggacatatatggtccagctgaaagaatcgcttgaatctatgggacatgaagtcgatctgcttggatatggagaagagaacgagattgttcatattgtaaacgaagatcgcaaggtgaaaaaagaacagcttttgcctatgattgagcaatcagtcgatcaacagtcttttccgcaattatatgacaatcaattggtccactttactgagatccagcgctatgtatacgaacttgcagctatttatttagggctggaaaaatacgacctgatccatgcccaagatgtcatctcaagcggctgcctgaaaagagtgaagcaaaaagacacgccgcttgttgccacgcttcacgggagtgtagcccatgaaatcagacatcagcttacaacgatccacaggaagtctaattctgacatcgcaagggcgtactttgaccatcttgaacgggtcggcgctgtttcggctgacgctacaattgttgccaacaattggttgaagaatctgttgacaaaggaattcgatacaccggaggaacaaatcagcgttctccattatggctatgatattgacagctttctaaaacgaaaggatacaaagtcagcggaaataccgcaaacagataagaaaattatccttttcacaggaaggctcgttgaaaacaaaggtgttcagcatctgcttgccgcactttcgcatttaaaagaggttcgggatgattgggtatgctggattgccggcgacggggagagaatggcgggactgagaattttatgcgggcagctcggtttggaaaacgatgtcgtgtttatgaaaaagcgcgatgatgtcccatatcttctgtcaatcgctgatgtgtatgttttgccgagtcttctcgaaaatcagccgctgtctgttattgaagcgcaattagccggacttcctattatcgtcagcgatgcagggggacttcccgaaatcgttgaacataatgtgaccggtatggtgacgcctaaaggagatgcacaggcaatttgcaactctatcaatcagttgttggaagatgagacgcttagaaaaactttagggtccaatgcacacaaatttgcaatggagtattggaatatggatgaagctgtcaacaaggttttggacatttatcaacaaactttaaaataaaggagacatgtcgtatgaagtctgaaattaaaaagcatttgtttgaacttctgacaaaagaggaaatcgatgtcggttggtgggataaatatttggaattgcttttcgagttccgaaaagaaagagttgaagcactggcagaaaaggcagctcagacgaattcagcagcaggctcagaagctgtatcaaatgaacagccggctgaatccggagaggccttaaagaacgaaagctcaaccaatgtaaacagcaaaaatgaagtcttagacgaattaacagccagctttgaagaaatgaacaataaaattatagaaagcaataataaagtgcttgaagcgatcaaagagtcacttcctgaaaattacacacttccaaatgatactacattaaaattctttcaaacacaaaatgaaaccaaaacagaatagttatttctcaatcaaccttcggtgctccgaaggtttttattaagtctttcaatctatcaatattggattgaattttaggagccgatcttaggttgttgtcttttacctttttattacaccgacatactatgttataaagaccagatgctctacttatagcgagaatgttccgtcagtaagcacaaggagtgagtatatgaatttaaaagagatacaaggcgaatatgatgcggttttcagcctagggcatttgtgcctgacagctcttcagctgagaaaaatgaataaaagaccttatgcaggaccttttgattgggtcggcacctcgtcgctgcctgatctgtgccgcttgatacgaaaccggtttgaagggtttatgaatcctataaatttgagagtgacgggctattctacaggagttgccactaaagacccttttatctcggttacggatgattattactgcattgactcggcacacgattttaaagcggatcgaaatacactcgacaacctggctacttatcatgaagtaatagagaagtttaataggagatttaacagatttttagaaaagacctcgactgcaaagcgcgtgctgtttgtcagaacgagcggcacgatgcaggaagccaaagagcttgaagaggtgctctctgatttggttacaaacgatttcagcgttcttttgatcaatcatacaaatgtatccggtattgttgaaaatcactggccgctgaagaacgtatgcgctgttgaacttcctgatcaagaaatttggcaatcaaacgacccgtattggagagaaatgttccaaggcataacaattcgttagtttttcgccgatgagaatgattgactaaggcacaaagggagagaaaaagcggatgtttgaaaataaaacgatattcattactgggggaacaggctcatggggtcaggaactcatacttcagctgctagcctcaagccctaaaaagatcattgtattttccagaaatgaagaaagacaagttcaaatgagaaggcagattgaagatccgaggctgacgtttttcatcggggatattagagatcggaaagcgctcaatacaggattaaaaggtgtcgactatgtcttccatttagcagcgctgaagcatgtcccggtttgtgaagaacagccgcttgaagcattaaaaacaaatgtcacagggaccgaaaacgtcattgaagcagcgatcgaaaacggcgttaaaaaagtcatcaacgtctcgactgacaaagcggccgaccctgccaacttctacggaatgacgaaagcgatcggcgagaagctgatcgtatacgcgaaccatctgtattcagacacgggttttatttgtgtaaggggaggaaatgtgcttggaagcagcggaagcgttcttcagctttttaaagaccagatcagggaaaagaaccaagtcgccatcacagacaaaagaatgacccgtttcttccttacgaaggaaaaaacgattcagcttttattaaaagcggctgaaagcggccaaggcggggaaattttcattatgaattcgccggcctgcaaaattttagacatggctgaggtgctgatcgaagcttatggaaacgaaataacgtccatcgcagaaacgggggcaaggccgggggaaaagcttcatgaactgctgatttcacctcatgaacggcagcatgctgtctcatttacagatgacctcgcggtggtgcttcctgcaatcaaaatgcccgagcttcataaaaagtatgcggattgccagcctttagaaacagataacttgagctcaaaagactttttaatctcaaaagaggaagtaaaagaaatgctgaaaaaaggcggttttttggattagacggatggatcgaagcgttcacggggaatatgcgaactgatgacaagcatggcatgcgtctgcaggcgatgctttcgttcgctcctccaaaacaggacaagccgggcgaaaaatcacccagccagccgctttgtcaatgttcaagtgttaatccttcgatatgttcttcgactttttttgtgcgttccattactttttccgtgtaagagtaatccccgtagcaataaggatagcggaaattgtttgtatccccgccgcaattgtacaggtcggggttctttttgacttgttcttcggaaaatgcctttgccagcttctcagagtgctttccgccgtgttttgagacatagtcgatataaccggcccccatattatagctttggataatcgtttcaatatcgacgccttttttctgtcccttttgatacattactgtaaaatggcgcacaccctgcttaatgcttgcttttggatcgtcaatctcatttcgcttcatgccgagagattccgacgactgcatcggatcaccgcctctgccttttgactcttgatacatcatgcccaataaaagaccggtgtattgtgaaagaccctgtttatcgagttcttcttcaacaagaggcttgtaatcttttaatctctcaagaatattagattcagtgtcaagaggaagccattttaattgttccagaccggagatggcaaagaaaatgatcaatggaacaaacacaaaaaatgacaaacagccagctccggctaaacatcctgatttctttttcttcaatggtttcacctctgtagcgccctgatgcaaaacagtatacagtctcatttattatgacatatctctacaagaagaccaagcgatataccattctagcgcggatcgcgatcaaagccgaatgtgacgtccggaagagaacggatcctgaacaaaaagtatataaaaccggcaatcagccagccggctccaattattagcgcatttttgctgatgctaagcagcagccagccgcagaaagaggcccctaaaaagggcataaccaaataacgaagcgtttttaaaaagcctttttcctgcctccgaatgtagtaatggccgatgacagacaaatggacaaaaataaatccgatcagcgcgccgaaactgatgaatgaatagatgacctctaattccccgatcatggccgtcaaagaaatcagcccgatgaacaaaatattaaataccggcgtctttaaagtcggatgcacgtagccgaaaaagcgtttcggaagagagctgtcacgccccattgcatacaaaagccgcgaagcgctcgcatgcgaagagagcgaggatgaaatgactgcgaccatcgttcccgccagaaagaaggactttaaaaaagcgcctcccgtatatagggctatttccagcgatgccgaatcggcatgccggaagttatcataggacggatagatttgctgcatcaaataagaaatcgccgtgaacagcgttccgccgatcgctactgttagaaagatggctaacggaatgtttttcttcgggttgaccgtttcttcagacattgtagagatcgcatcaaaaccgagaaacgaaaaacacaaaatcgtcgcccctgacacaatcagggaaggttcgatatcagaatggaaaaacggatcggcagaaatcagctcgcccgtcccgaggccgcctgccagcccggcgatcataaatccggcaaaagtcagggcgacgatcacttgaaaagcgacgaacagccctgtaatatttgccgttagtctgatgcctaaaacattgacgacagtgatggatagagcgagcagaacgacccaaaaaccatgcggcacttctggaaaagccgccgttaaataagcgctgccgatcgcaaagttgaccatcggcaaaaacaaatagtccagcatgatcgtccagccggctaaaaatcccgcatgcggatgaatgctttcatatgcataagtataaaccgatcccgctttagggtaagctttgaccatgctgccgtagctcaaagcggtcaaaaggagggcggcaacagtgaatacgtatgccgccggaacgtgtccctttgtcagctgtgcgacaactccgtaggaatcaaatacgacgagcgggtccatataagcaaggccgatcacaacgagcgggccgagtgtaaggcttcgtttaagcgcagtttcgtttttcaatgacttctaaatccccttatgtaaaaaatacagaaattaagacatattttatctgtttttttgtgcttgagcaagcgtatgaaaacctcttttttcgcataaaaataacaaatgttgcaaaccctttgaaaaaaggcaaggagtatgaagatatggatatattgagaggctatgttgaagccgtcaaaagaaatatggaaacgatgaatgcatctgattatgatggaaaagaagaggatttaagaagacagcaggaagagctcgaacgctatgaacaacagttaaaagagaaaagcgcttcggccgaaagctttgatcaggtagtcaatgccgctgtagattgcgcggccggcgacatttcctattcacagcttgaacaaatgtttcaaccataggcaactggcgtccaggatcatcggacgctttttttcgctttcagaaaattgccggactcttcgaatgacaggtcattctgaatctttagagcataccgacacataaaaatatttgtatacatgaagaggatggtaaaatatagtttaaaaggggaggggcaactttgaaaaaccatatttgcacgacgtgcggcgttcaatataacgctgcttcgaaagagccggcagaatgcattatttgcaatgaagaaagacagtatgtcagtttatcagggcaaacctggacaacactggaagaaatgaagcaaagcgggaggtttcaaaacgagatcacctttgtagaggagcgcctatacagtttgacgacaacacccgaattcggcatcggtcaatcggcgtacctgattcaggagcccggctttaacttgctgtgggattgtattacatacctggatcagcgtacgactgagaacatcgagcagatgggcggaatccaggcgattgctttatcacatccgcattattattctgcacaggcggaatgggctgaaatgtttgatgctccgatctatattcatgaagatgacaaacaatgggtgcagcggccgagcagccggattgttttttggtccggcgaaactctcaagctatcaagcgggttgaccttgcacaggcttggcggccattttaaagggggagcggtctgccattgggcaaacgggaacgcaggcaagggaatcctcctttcaggagacattatccaagttgttcaagatcgcaggtgggtgagttttatgtacagctatccgaatttgattcctcttcccgccggcaaagtgcagcaaatggctgatcaaataaaggatgttccattcaacaggctgtacaacgcttttcgccgctcagttgaaaaaaacgccggagaatgtgtgcagaggtctgctgcaagatatgtagaagcgcttcaaggaacgctgttttcgacttgatccgttaaaacttttcaaccggtatgttttggtatatgatatggaggtaaaagtcgcgcggaaaaggtgaaaagcatgagtgagcacaatcaagaaacaacagaaaaacaggtgcgggccgagttagatgaagaaactttatttctcgtttcacagacgtttaaagcgctctctgacccaacgagaatcaaaattcttcacctgctctcacaaggcgagcattcggttaatgaaatagcagagaagctgagtctcctgcagtcaaccgtttctcaccagctcaggtttttaaaaaaccttcgtctcgtcaaatcaagaagggcagggacttccattttttattctccggaagaccagcatgtcctcgatgtacttcagcagatgatcgatcatacacaacatgactaaagtttaaaaggcaaactcaatttcccgagtttgcctttttaagctgagcgcttttcttcggttctgcctttttttaaaacaaaaaaagagaaaccgacataataaacggccagtacaaaaaaaccgatcatcgtcgccgggtcctgcgcaaaaagggcgccgtaagctgccgaacccccgtctgaaaccgcagtctgcagctggccgatctcggcgatccggtacagaaaccggtataaaaataaaaagagtacgatcaattcaacccataaatgcgttctgaaataaaggactccgccccgattttcgatcgacacatgcttcagcgcatagacggtcaagatgagtccgagcgcgatcccaatcagatcataaaagtatgataaagggtgaagtgcgctcatcgtcagcagaaaaacgaaaattcccgaaaaaaggatgatccggaacaacatgcgtgccggctttaaaggctgataaccgaccgaccgtttgaacttgatatagacgatggacacaatgatgaaaaactgcaaaaaataaaatatgatgtttttaaaacctccttttttaaggagtatatgtccaaactgtacaaatcgtaacctgaaaagtggttttctagataaatgggtgatgagatcctcttttttgtcatgatatcccagaatggtgtgtgctatggaatgaaaatagcagaaaaaaagaggctgcacaagatgaatgtgagggatctgcagtgaaaattgaccggcttttggccattgtgattttattgattaataaacgccaagtgcaggcaaaggagcttgccggcatgttcgaagtctctgtcagaacgatttatcgggatattgaggcgatcaaccaggcgggcattccgattgtcacctcacagggagcaggaggcgggatcagcatcatggagcggtttcggctcgaaaataagctgctgtcagcagacgaactggcggccattacgacggctttggaaagcgtttcctcgacgtacgaagtgctccatcacgggtctgcacttgaaaaaatccggtttctcgtttcggaagaagaaatgccggaattccgcaagaaaacggaaaaatggtttgttgacatctcttcctggggagaaagtcctgtcatcaaagaaaagatccgcttgctggatgaagcgtcagacagcacgcgggcggtctcctttaattatgtggacagagaggggcagaccggaaaaaggaaagcggagccgcataccctcgtcctaaagggaaggcactggtatttgtatgctttctgcctgaagagacaggcgtttcgcttctttaaactgttgcggatgaaagacgtgcggatgcttgaagaaaagtttgaaagaaaggaagtcgatctgtcttcacttccttgggagacatcgtggtacaaaccggacaatatgaccgaggtgacccttctcattaagccgtcgggagagtctttggcaagagaatggttcggctcagaagctctcacttatgaaaacggacaatgcgtggcaaccatttcttatccggaagatcaatggctgtacggatttctgctccaatttggaacccatatcgaagttctcgatcctcctcgcatccgtcaaaaaataaaagacttggcaaaacaaattgtacatttatacgaaacctgacacgatgctgtcaggtttctttttgtatgatgaagaaaaaggaggaatgaaacatggaacattatttttgccaaagctgcggcatgccgatgacaagcgaacttttcggcacagaaaaagacggggggaacagtcgtgactactgcatttactgctatgaaaacggagcttatactcatccagatgcgacattgaaagatatgatcgaaatctgtgtgccttatataaaagaagagggaaaaaccgaggccgaagcgagagcgcttttgtcgcggacactcccttatttaaaacgatgggcggcggcgcaaacggaaggcgggcagggaagatgagcttttctcatttcgaaaaacagaaggcaaagttattcagcggggtatccaccgtaacaagcaaccaaaatgaagcaaccgaaaaaggtaaaattccttccatgtggagtttataccgtgaaagatttccgcataaggaacgccaggacatgaagagagatacgattgcgctttattcagattatgagtcggaagaatatggggcgtatacattttcaatcggtacgttcgctgatcagcatgaaaaagcggccaatgtgatttcgctccctgcatccgaatatgccgtttttgtttcaaggcgggggaggatcgaagaggtcgtgtttgagacttggcaggagatttggacatgggctgagaaaaatctccgtacatataccggagattatgaagtttatggtgaacaagcagtgaatcccgaaaatgctcaagttgccatttatattgctgtcgatcgaaaaaaataaagcttgtaaaactaatgctgttagttttaaaatggaaactaacggtattagttttttattttgatggaagaggtggaagttatgaggatgacccgatttgaatctgtttaccagctgactttttttccgcacatatttcctgtcaactgttatttagccgatgaagaagacggtctaacattaattgatacagggattccgatcagcaaaaccgggattttaaaggctgcggatcacctccgcaagccgattaagcggattttgctgacccatgcccacagcgaccatgtcggttcgcttgacgcgctgtaccacagccttccgggtgtgaaggtgtcaatatctgaacgggatgcacgtctgttaaaaggcgatacaaagatgctggaaggggagcgcggaataatcaaaggaggcgttccgaaaaacatcaagacaaatcctgatatctttttaaaggaaggagacagaatcggttcattgctgactgtttcatcacccgggcatacgcctggcagcatttcgttttttgatgaaagaagcggccttctcatagtcggtgatgcgtaccatacgcgaagcggcatgacggtatcggggcatttaaagctttcatttccttttccggctttggccacatgggacaaagaaatcgctttagaaagcgcacaaaagctgttagatttaaaaccaaaggcgcttgccgccggccacggcgatcttgtccatgatccggctcaagcgatgaaaaaagcggtaaacgaagcatacatcaaattaaacaggaaaggatgaaggaatcttgtctccgcgaatcggtttgaataaagacgcagtattggaagctgctgcagctctggctgatgaggaaggcattcatgaagtgacgcttgcttcactttccaaaaggctgaatgtcaaatctccgtctctgtacaatcatataaaaggattgaacgacttacggaaggaactcgcactttacggcttgacgattctttatgaaaacatggcttcggctatccagagagccgaagaggatcaggctgtcagccaaatggctcatgcctatctcgcttttgccaaaaacagaccggggctttatgaagcaacttttattgcaatgcccgatgaagatggacggcttgacgaggctggagacagagtcctcgccttggtgctttccgttctgaaagactatcatttagatgatgaagccgcgattcatgcggtcagaggcttgagaagcatcctgcatggatttgccgcactcaggcaacacgatgcgttcggtcttccttatgatgtagaagaaagtcttgatctgacaatccgcgtcttcttaaaaggcattgctgtctatcagaccgaataaacaagaggatttttcttaattgtttacattttttcgaaaatttagtatgattgtcgtatggctcttccattttttgagtcataggtatgagaaggcttaaccagccactaattgccttggcctaacagccgaggatttttttatgtcggcaaagagagacttgatatgcaaaaattggttcacacatcgtgtgttccatgttatgctatcattgtgaatatattcacaaaagggtgtgcacaatgaaaaaaactccaatttatgtagaaatatccatccaggcagaaatggagcggctatggcgctatacccaagacccaaccctccatcggcaatgggacttgcgatttacggacattacctatttaaagcgcagaccgggtgaacctcagaggttcttatacgaaacgagaatcggcttcggcttaaaaatctccggcaccggggagtctgccggaaacgtatttcaagatactggagacagagtctcgtcactcaagttcgctacaaaccacccgctttctgtcattcgcgaaggaagaggatattggaaatacagcgagagcgaaaccggaatcacgtttatgacacaatacgattatgacacccgttacggtaggctgggccggcttgcagatatggcattcaggccgctcctcggctgggcgacggcctggagttttgatgcactgaagatttggcttgaaaaagggctccatccaaggctgctttttcaaaaaacattggtctattggctcgtttgtctgctgttttctttcgtctggatttaccaagggcttgttccaaagctcatcatggctcaccctggggaaatcagcatgctttcggcttttacgggcggccgtttccatcccgaaacgctcctgaggcttatcggtttagccgaggtgatggtcggcgtgttatggctttatcctgttcggaaaaggaagtggtttcttctgcatatcgtcctgcttgtgctgctttctgcctccgcgggaatggctgatatcgcatcttttgccgaaccttttaacccggtcgtgctcaatgccgcacttatcatcttgtccgttatcggctatgtgagcgcttgcggcattccaaacgcgggaaatacgatcagaaagaggcgttgatttgatttcgatgtatgaacgggtgatcgaggattttcaccttctccacccaaaactcaaggagcggtatcagctcactcaagaaaacgtgttcaaaggaaaaggagtgatgacggaaatttccggcggttcatactgggtcagactgttgttcaaagcgggaacggtcttccgctgtttttttcccgaaagggggaggaacgttccgttcacgattgaaaatcacattcggctgacgaaaaatgatacaccggcagccgtttggaacaggactttcttttttcaggataaacaaaggcatttcgatgctgtcatgatctatgataaaagccgtgttgaaatcatcgactatttcgggcatccgccaatcttaatctcaagcctgcggtttaaggcggaggccgacggctcattatcgattacttctgtcagacaatggctgcctttattcagaaaaaagctgccccttccaaagtgcttatacggtatttccagcgtgaatgaatcgtatgacgaagaaaaaggctgttttacaattgacgttcatgtgaaaaacccgctgttcggaacgctgtttgcctacagaggaacgtttaacagggaggaggagacggcatgaaagcccgccgtttttttgtaagcgttctttgctacgcggtttttttcatcggcaaagcgccggatatcccggcggcagaggcgcttcttttattatcaatgctgttttttgttccggctgcgctcgatctcattcagcatgaaaatgggatgtttcggctgatcagcgtctgttttccttatgcggcttgttcggcatcgctatcactgctgttccattccccgcttttttcattggtttggctatgctatacggggatgatcgccttatacggggcacttcgcctctgggagagagaaggaaggagccttgaagaggcatcgattgacagcggcctgctttaccttccttttggaggggggtggctttttgcttatacgctgaatctccaggtcatggatttcagcccgctgattgtgctgctgacagcggtacattttcattattctgcatttctcattccgatttttaatggaatgctcggaaggaagctgaaaaagaaaggcctcctttatgcggcggtgacatggctcatcatgctgtctccgctgttcattgccatcggcatatcgttttcgaaaaccattgatgtcatcgctgttgcgctgtatttgtcggccctatacggaagcggctttctcgcctcgattacggccttcaaaaacagcgcggctcgccgctttgttatcttttcgtcttttacattaatgatcaccattgctttttcactcatttactcttacggcgtttttcgcggccggacgacttttacaatccaggaaatgatttggattcacgggcttgtcaacgcctttggcgtcatcattccagcgctgaccggctggcgccttgaatcccctgggccgggctgtgaaaggaggcaaggcgaaacgatgagcaacatttacggcacttggaagatcggagccgattttttacacagacaccgattacaaaccgattcgtcttaccaaggtcttgccgatgatatgagcgcatttcagagcaaaggatttcagcctgagaaggtttctcctcttattctcgatttctatgagcatactgccgattattcgttaacagcggagatctcctggcgtccatggtttaaaccgctcgcgcacatgtaccagctgatttcaagaaagacaggacaaattcatttggggactaagaccggacggcaaacgatggacggagagattatcggtgttgattcagccagagacggaaggaagaatgtgcgcgcctggatcagaacgaacgaggtaggcgagactgtgtttgtggcgctttattctgctcatacccacgatcacatcacatatatgaatatcgcgctgccattgccgttttccaatatgacaggcattttaaagccgaaagcagaggacggctgcctgattttgacgagcagtgataaacgatctgaccgtggggatgaaggcatcttcctttcgaccggaacaggaacgtttaaactgccgctcgccgaacgctttatcattaaagagcagggacgaaagaggctctgcgcccatcaccgcatgtggctgttcggcatacggtttctcgacattcaatatcatattgaaaaaaaggattctgccgtgaaaagggcgaaaatagcaaatgaaagctaggcaaaaatcgaatcgaactggagggtctttatgctaaaaaacgttttgcttgaacagtttaaagcatgctataacgaaacgacttggtttgtttgttttcaaacggctgccgctgatctcacggaaagccaggcaaggcaaaaaggggaaggttcggaaaattcgattttagaaattgccaaccatttgattttttacaacgagcgctatttaaagcggtttaaaggaattcccgttccggcttttgattatacgatcgatgatacgtttgtaaacaaaagcggacttggctggaaagaaagccggcaggaactgaatacgatctatgccgaatggatcgatgcgctttcggaatgcgaagaggagatgctgaaacaaccggctcagcacgatccgcattctacctgggcggagattttgtcctgcctcattcttcataatgtttatcatttggggcaaatcgtccatatgagaaagcagctgaaaatctgggatgcttcaaaaggcgtgaattaacggagttacaagtaagattgcggcttaaggcggtcacctcttcaagccgtaatcttgcctgaggtcaagcttcgatttttgcttttaggtggtaataggcatctttcagccagggatggacaactttcagtttatctttttgtttccacaaatgctgaatataaacaaacgccccgtgctccagagaaatttcaagcgcttcatgaagctcctggatgtaaggcggagtccccgtctgatcccattctattttgtccgctgaaaacaggacaaggtcgagctgggaaggatttttttaagcgtcgtatggcattctattgcatttaaaatatcttcatccgccacctgaaacaggtcccgcgccatcactttcgacagcttttgatggatgatcatcgggaatatccgttcttcgggcagaatatcaataccgagcgcttcagcagccgcaattcttttttcattagggatgacacccctgatgtcgtgcatcataccggctataccagctttttgtgcaggaacatgaaaacgatttgccaatctttctgccgcttgtttcacccttatcgaatgttcggctgttttttcgtggttatggcgtctcaaaaattcaagggcatctgaacatacatcgcctgtgcagcgaacttccatctctattccttcaatattcatcagcgattctcctttttggtgttgtttcatgataaacaaaacacatttgttatctgatttcaccttatcataatattgacaaatcctgaaataaactattaaaatattttgttaaccggaaaataaaaagaagggactgtccattgactatgtctgaactgacaaaacagctgatctatgatatgtatgttaaactcctgcacctgaacgaacaaaaagcggatacagatctcaaggcatttttaaagcaggcggcagaatctgatgttaaacggctcccggggaatatgactaccatccatgtcatcagctgtatcggtcatgatgaaccgatcaacaacaccggcatcgcaaaaaaaatgaatttatcaaaagcaaatattacaaaaatcagttcaaagctgttaaaagaaggcctcatcaaacggtttcaattgacggacaacaaaaaagagatatacttcaggctgacgcccagcggaaaacaagtgtttgagcttcatgaaaagctccatcagcaaaaagcggatcagtttagcagatttctcgattcgttttcaacagcagaacagggagcgattttgaaattccttcaagggctgacgtttatgacagaaacggataagaagcattaattcaatctaacaataatattattatgtaaacttaaaaatctatggctgagagaagaaaatcgattgacaagaaatactttccatattatagttaaaccatcaagttagttatttgaataactaagaggtgaaccgaatggcaaggccaaatgtgacatcaaaagaaacgttgattgaggcggctaagcgccgcattgccgaacatggcctggacaaactgacgctaaaggcggtcgctgaagaagcaaaggtcacacagggaactgtttactatcattttcggacaaaagagcagcttgtttttgaagtggtccgcgacctatgccgcgcgtcgtgggagcgattgaaagcaaatgaaaagcccgctgccgaaaggataaaagacggattgtcttccgcgaaatcaagaacactgaaggatgcgtattatcatcagctttttttagaattggccgttttagggtttcgaaatgaaaagataaaagaacagctcggcgaacttctcgaagaggaaaatgcggtgttggcagaacagctttccgacctgtggaagcgttctcctgttgacggggtttctttcagcacgtggggcattcttttaaacgcactaatcgacggtcttgcacttcagtcgcttatgtctccgggattttcccctgaaaaaatctacagggaattagaagctgtgctgcagatgctgacggaaaccgctgttaaacagcatggaggggagtaaaaagggatgggtaagttgactgaaaagctgggtttggctcttgttttttcaatcgttgtctggcttggcgccaccgtattttttatgctgttcggcagtgcggttcttacagaacccggccaagatggttttatgctccgctttttgcttcttgaagccggaacttttgcccttttatatgccgtgatgctcgtttatcggcgggttgacaaaacgaggtttgcggcggttaagcttggcattgtggggtcggctgtcggtttgtttctcgacgctttttctttatggaatcattcgctgatcttcccggcgctttcagatggccagatgattgggtttgcggtttggatggtcttcgcgtatgccatgtatttgacgataccgctcatccttgaaaaaagaaggtctgcagtttaaatatttttatgtaagattcgcccgcttattgcaaaaacgggcgaacggtctttagtcttgcggcaccgattgttctgcgttgatgtaccctgcaccgtaaacatttggatcgcgatctttccataaatcggtaccgtccattagcagctgtttgacttcatcaggttctgtgcccggggcttgctgaaggataagtgcggcaattcctgcgcagatcggcgtagccatcgaggttccggacaatgtcatatattttgtgccgactctgtttgttttttgcagcttatcgagaaaagatccgggtgaacgaagcgacgtaatatttgtgcccggtaccagcaagtccggtttgacttgaccatagattgtcggccctctgcttgaataagaggcgacatcgtcatcctcccggctgactgtatccctgtcatccaaggctccgactgtaataatcttgctgctgacacccgggctggcaatcgtttgcgcatcaggaccggagttgccggctgccgcacatacaacaatgcctgcgtcccatgctgcatgaacagctttaacgactggatcttcttcttcattctcgtagcgcaaggcttctgcacccaatgacattgaaataatgtcgatcggatcatcaggattttccttattgaattgaatgcaccaatctacgccttgaatgacggtttcgagcgatccggatcccattttgtccaatacttttacaccgacaagttctgcttcaggagcaggtccgcggtactgacccgatgaggccgctccgtttccgcaagcatcaccggcgcagtgtgtgccgtgcccattgtcatcatagggttctgttctctggttgataaagtcttgaaaagccctgatcctgccttcaagatcttcgtgagggtatacgcccgtatcaatgacagcgactgtcactcctttgcctgtcagcgtctgattgtttctgaccacttctttggcatggcttgattcaaccgctacgtcgaggagcgcttttactttgcgatttaaataaattttgcgaatgtcgccgcactcagatagaagcgattgcaaagaagaaggggtgacttcagcgctgcagcagctaacgttggagaagcgatgcttgattttgtttcttcttttgctgccgatcatttcattgactaattgatagcctttatgctgacagtctttttcaaattcaataatgactggtatttttttgtttttcattaatattttttcgaaaaaaccgtgtaaaaagcaaggcgtccatttaaaaggtttatagagtttcagcacgctttctctcagcggccggtccagcttatgggcgttggaccttaccatttgaaccatgtaggaaccgaacattctagctccacctcatctcttatagtttattcttcctcttaatctatgaatgagaggcggttcccgtaaagttggctgtcctaaaacggcggcaaaaaaggcctgtttactactcgattctataaaatgcagcggaagtccagggtttaaacgaatcaaaatacatgatattctagtcatgtcaatatcaccctttagaaagcggccaaaggagctgagttcatggcaacaatcgaagattttttaaagcttgatattcgggttggaacagttttaaaagcagaagagtttccggaagcgaaggtaccggccattaagcttgaaatcgattttggcggagagattggcgtcaagtgttcgagcgctcaaatcacaaagcgttatacgcctgaaaagcttgtaggccggcaggtgacggcagtcgtcaattttccgccgcggcggattgccgggtttaaatcggaagttctcgttcttggaggcgtaccggaaaaaggcgatgttatattgctggcccctgatcaagaagcgcccaatggaacgaagatcagctgatacataaaagagaggctccctctaaatgaaggaagcctctcttttttatttcaccttgaattttttcgtcaattctcgcagatcttccgccatctgctcaagcgtggcagaggatgtactgatttcttccattgaagccagctgttcttccgctgatgcagcaatgtcctggattccagctgtactttcccttgatacatcggcgatttcctgaacggcaccggagacttcctgcgagccattcgacaactgttcgaccgccgcattgagcgtttgcagcttgcctgcgatctcattcgtcatgccgctgatttcgtgaaagctcgactctgttttctcggtaattttaagtccggactgcacttcatggttgaccgattgaaacatgctgagagaatgttcgatttctttgacgatttcctgaatcaacgcttcgatttcttttgccgagtccgctgactgcgcggcaagctttcgaacttcttcggcgacgacggaaaatcctctgcctgactcgccggcgcgggctgcttcaatcgcggcgttcaatgccaatagattcgtttgatcggcaattccgttaatgaccctgagaattgatgtgatatccttcgatttgccttcgaggcctttgacgacgctctcagcttgtttgacagattggtcgattgaactcatctggccgaccgttttctgaacgagttctcctccggtttcggcgatttctgtcgatttgatcgatgcttcggtgattgattccgacacttcggtcatttcgctcagatgatcattcatctggctgagctgctgcgagctcgtttcgactttttcattctggctttcagccccgttagagaactgttcgatcgcagatgtaatatgttctgtcgcttggctcgtctgttctgcgcttgctgtcagctgctcagaagaggaggcgacattctcaaccgattcctgaatggtgccgatcagtgtgcggagcgattccgccatgtcattgaagcttttgccgagctgcccgaattcgtcatttgaacgcacttcgatttgctgtgtcaaatcgccgctgctgatgttctttgcagatagaacgagctgattcaatggtttgctaatcgcgcggacaataaagaaaatgagaactccgccaagcaccaaagcccctgaaaagacgatgagagccatataaaggacgggctttgttgcgtttgttatctcatcggaaaacatcgtcccggcgattttccagcctgtcagtttgtttgtcgtaaaagccatttgcttggcttttccttcaaaagtatacttgaattcgccttttcctttgccgtaaacttgatcaacccagccgccttcaccttcagttccggctttaatcgtcgggtgggcgatatattttttggacgcacttgagataaaagcaaagccgtcttttccgactttgatatcgtttgtcgctttaatcagctcgtcgatattcaagctgagcgcagcgacgcccgacccgtctttattttgtttggcgatggtaatgaccgtgttgccggtagcggcagatgtgtatggatcggtaacgataatttcgccttttttctcaaccgcttctttaaaccagggcctttccgccggattatagccgtcaggcattttcgtataagggtgctgcacgtatacaccgtcttcagagcctgtgaaaacggcttctacatctttgttttgcctggcgtattgttcaaacttttgtcttaacgaagtctggcctttttccttgtatgttttttctttgatctcttcactgaaatatgtaacagcatccgcttttttctcaatgttttgatcgatcatttcgtttaattgatccacgctgtttcttgcgcttctcatgatttcatcttcaatcgacccgcctgccgtataataggaaacacctgaaaggattaaaacagggagcgttaaaatcaataaaaatgagaccgctaatctttttgaaagagatggatgcttgaaccattccaatatttttttcattagccaaaactcctttttctaggttacgagaataatatcggacaattttcacacttttgcattaaatttaaaaattttggcttcaaaacaaaatcctcaacaaaggcgaaagtatctgtattgacggaaaatgggctggagaactgttgacaaagtttccctccgtttatatacttatcggtaaatacagtgaaaggaataggtataggggacatgaagcagtaatcttattttccatcgtttttttaatatgaaaaaacggaaacttggagaataggatgagtatgcccttttataccttgcatcattttctgactttgcatgttttttgtcgtgcaatggaatgggatcggtttataccgctttcacgatgcatattttggcatgatatcctctccgggtttccgcgagaggttttttgttgtcagccaaaaataaacagaggtgaacggtatgacgattttaatgaaaataagaggcttggaaaaaagctttggagagcaaacgattttaaaaaacattgattttgacatttccaatcatgagcggattggtttggtcggatgcaatggagcggggaaaacaacgcttgcaaatatattgagcggtcatgcagaagccgacaaaggcactgttcaaacagaccggacgctcaaaatcggctatctgctccagtcgattgagtactctgttcatgatttcaacagcatattaacaggcgacgagggcgggaaattatatcagttgacgagcagtcttggcttatcaaaggttcaaagctggaattccgaacggctcagccatttgagcgggggagaaaaactgaagcttgcactggcacacgtctggaagacgatgcctgatcttctcatcttagatgaaccgaccaatcacttggatttaaaagggatcagctggctccttgaagaactgcaacaatatcaaggggctgtattgattatttctcacgaccgttattttctggatcaatccgtctccaaaatacttgagctggaagatgggaatttgcacacctatcaaggaaactacagtgcataccggcgggagaaaaaacggttatacgaagcacgcctgcaccaatacgaagtccagcagaagcaaaaagaaagaatcgagtcacagattgccactcttcaaaattggtcgcagaaagcccaccgcgactcaacaaaacagggatcacagtcagaaagaaggcagcttggttttaaagaataccaccgggtaaaagccaaaaagcttgacaaccaagtcaaatcaaaactgaaacgccttgaacaggagcttgaaaaaaacaaagctgaaaagccaaaggaagcagcatctgtcaattttcagttttcatcaggagaaaaaaggggcaagcggattatcgaagcaaaagatctgacaaaagcgtttgacggacgtactttattcaaagacagccatttttacgtcaaacacggcgagagaatagcgcttatcggagacaacgggtgcggcaaaacgacccttgtcaaaatgatgttggatgccgaacctccaacagccggaacgctatggaaaagccggtctgtaaaggccgcatatttaagccaggatgtcagtgatctaagggttgaccaaacagttgctgaagtgctgaatttgtctgacagagccgaaatcgcaaatgcgcggacgattttggccaatatggggatcaaagaaaaccgctttcatgatgaaatcgggacgttcagtctcggggagcggacccgaatcaaactggcaggcatgattttaaaagattatgatctgctgattctggatgaaccgaccaaccacctcgatttgccaagcagggagcagcttgagcagacattgcttgagtttcagggaacgatcatcattgtgtcgcatgacctgtacttcacagacaaattgtgtgagaagctccttgtatttgaaaacggtcgtatcacccgcgtcgaaaccggattaaaagattatcggaacagacagaaacagccccatgcaaaaagcgatgaagaggagcggctgcgcatcgaaaatcggatgaccgccgttcttggagagttggccggacttacgcctcaagatccgaaatatcatgaattggatcaggagttttcagagctggccaaacggaaacgggcgtttttagaaaaagaataaatgaacagaaccatttgtgtttttaacgcagatggttcttttttgtttgacgtggtttaaattaccaccaattatagctggcacccaaggtaataataggataaaaatgatggacttactacagcaatgaaaaagggtgatcaacatgtggaaaaccattgtttcctattttccggactggctggtcctgatgcaggctttttttgtcttttttgtcccgtttgccatatcaaaagtatttttgtggcttcgcacggcaggggatgagtgagtggcatgagatggtggaaagcaaaaacgcgaagaatgatacagtcgtccaacaagccggataaacctaaaaatgaagtgccgtctgtggagtcaactgggtattttaccggcgattttgatcacgacttgaaactggccaaaacggctatggagaataactcagacgttcatttccgcgaattcaacttagggcgcaccggcatccgcgcggcgattgtatttgtcgaaatgcttgcggatcaagacctgattgacaagcatattatgaaatcccttatggatgatttttccaaagaatataaagttgaactttcttcattaagcagcaatgtgaccgacttaattaaaaagcaaattttatcaattagcggcgtatcagaggtaaaccatgtcaacgaagtggtgcccgaagtgttatccggtgcggccatgctgctgatcgacggttcagcggaagttttactgctgggaactgttaaaagaaatacaaggaacattgaagagcccgtatcagaatctttggtaagaggcgcgcgcgtcggctttacagaaacgatcggcaccaatacagcccttttgaggcagcacggcaaaaatcaaaacttgtctatggttcaatttcaagttgggaagcgagccgtcaaaaatcttgtcgtcgcttatatcaaagacattgcggaaccagggctggtggaagaagtcaaaaaaagaatcgaaaagattgatatagatgatgtccttgaatcaggttttgtcgaacagctgatcgaagacaattatctcagtccatttccgcaggtgcaaagcactgaacgtcttgacagggtaatgagtgcgttaatggagggaagagtggccattttattggacggaacgccttttgttttaatcgttccggttacattcagcatgctcctccaatcgcccgaggattattatgaacgctggctgccgagttccctgatccgcatcatgcgaatcggcgcagccatgatctcgctgcttgggccggctctatatatttcctttatttcgtttcatcccgggctgattccgagtgaacttgcgatttccattaccggaacgagggtaggtgtgccttttccatcgctgattgaagcgctcattatggaagtggcaattgaaattttgcgcgaggccggcctgcggcttccaaaaccaatcggtcccgcgatgggaatcgtcggcggtatcatcatcggggaggctgccgtgcaggcaggcatcgtcagcccgattatggtcatcgtcgttgccgtcaccgcgatttcttcatttgcgattcctcaatacagcgccggcatttcgctgcgcatgctgagatttgtagcgatgttttgtgcagccacgttcggtttgtacggggtgattatgtttttcctcatgcttgccagccacgcggtgaagctgaaaagctttggcgttccttatgcgagccctgccgttccttatcgtttgcgcgattggaaagacttcatcgttcgcatgccgatacagatgatgaaaaaacggccgaagctgttaaaaacagacgattcgacacgccagtagcatagaaaggagggaaacgctcatgatggtcaggcacgaagagcgcatcaccacttcgcaaacagcagttctcatcaccaatttcctgcttgggacagggattctgacgctcccgcgaacgtctgttgacgaggtggggacgcctgatgtctggatcacgcttgtattaggcggcttggtcgctctgacggccgcagtcatcatggtaaagctcaaccatcaatatcctgataaaaccttttatgaatacagtcaggacatcattggcaaatgggggggcagcttgatcagcctgtttttcgcatgttacctcttggcccattccggttttcaggtccgctcaatgcttgaaatcatccgcttttttctactggaaggaaccccccgctgggcagttgcgatggtttttttgtgggttggcttatatttgatcgtcggcggcttaagttcgatcgcccgcttgtttcaaatcgtgttacccattacattcattctttttctgctggtcgtgttcatgagtatcggaatttttgatgtggacaacttgcgtcctgtactgggagagggaataggtcctgtcttaaaaggaataaaggtgaccgcactgtcgttttcaggtattgaaatcattttgatcctgatgcctttcatgaatcagcctcgcaaggccattcatacgatcatgatcgggatcgccatccctttgcttttctatatgatcacagttgttatggtgatcggcgctctgtctatagacggagtggtttcacggacatggccgacgattgacttaatgagaagctttgaaataccaggtctgatatttgaacggtttgagtctttgctgctggtcatctggatcatgcagctgttctgtacctttgcgattgctttttatggttcggcattaggcctggcccagctctttaaaacaaatattcggccgatgatgtttgttttgcttccggtcatttatctgattgcaatgatcccgaaaaacatcaacgccatgtttgcatttggtgactttattggaaacagcggcgtttatttaggcggtttgaccccgctcgtgctgctggtgatttcaaaaataagaaggagaaaacagggaatcagctgacgcttgaaaaagaaaggggtgatttctccatgatggtaggtcagcaggacaaaattaccgtttcacaaacgagcatcgtcatcacgaattttctgctgggaaccggcatcttgacgctgccgcggacatctggggaagcggttaaagcgccggatgtctggctttctgttgcattcggagggctggttgccatattagccggtttcatcatggtgaaattaagcatggagtaccccgacaaaacgctatatcaatatagccgggatctcattggcaagtggccgggaggacttttcaccctgcttttgatttgttattttctcgcaacatcaggtttccaagtccgatctgtcacagaggttatgggattttacttactggaagaaacgccgatttgggcgacagcgatggtttttttatggagcggaatctatttattaaccggcggtattaacccgctcgcccgactttatgaaatcatctttccaattactgttctcatttttctgatcgtcatttttatgagcgcaagcatattcgacatcgacaatttgcgcccggttctcgggaaagggatcaagccggtgctggaaggagtcaaaacaacgtcttttgcttatacaggcatagaaatcatactgatcatcgttccttttatgagaaagcccgagcaagccttaaaagctactttgatggggatttctttcccgattgtcttttatatgatcaccgtcattatggtcatcggtgcattggcaatcgagggagtgacatcacggacatggccgacgattgatttgatgcgaagttttgaaatacctgggctgatttttgaacgttttgagtccttgctgctagtcatctggatcatgcaaatgttctccagttttacgatcagctattttgctgctgctttaggtttgtcgcaactcttgaagaaaaggatggaaccgatattattcagcttgcttccggtcatttatctcattgcgatggcgcctaaaaatatcaatcagctttttcaaatgggagatctaatcggcaacagcgccatctatttggtcggtctcatcccgctaatgcttctggtcatatcgaaagtgaggaggaaaaagtttgaaaaaaactaacaccatccgttatttaacgagtgttttactattgtttctattaaccggatgctggagcagccacgaaattgaagagctcggcttaacatttgcaatggggattgacaaaggcgaggaaaccgaacttgaaaaaaagtttgacaaagttgggggcgattatccgaaaaaagaccggatcacgatgatctatcaatacgtgaacgaacaagcagccggttcaaaatcgattggaggaagcactgatcaaaaaacgtatatcaacgtttatgaaactggagactcgcttcagcaaattaacgctgaagtagcattaagacaagacaggcctgtattcagtcctcatttaaaagtgattgtcatcgccgctgacctcctccgcacctattcgctgtcggaactgctagatcagcctctccgcgataatgaaatcaggccgagcagtatggtgctggtcacaagagggcgtgcgagagacacgcttgagctgaaggaaaccggcgaaatgccggcgtttcgtctgcttaaaatcgttgaaaatgagtataaagcgaaaaaaattctccctcctgtaacgcttgccaaattgacaggcaaaatgagatcaggaacaagctatctgcttcaaaatgtcatcggtaccgatggagaaataaaatatgcgggagcagccgcaattaacgggaaaaccaataagctgatcggctatttggatgaacacgatttagaaggcgtgatgtggatcatcggaaaggggattgggggcatggttaaaagctatgatccgacagaaaagaagttgaccgcatttggcgttgaatcgattaaaagcaacatcaaacccatcgtcaaaggaaaccgcctgtcttttgaagtgaacgtaaagtcagaggggtatcttgcggaaaactggaacacgaaagaaaaagcttttgatgacaaatttttagaaaaagtcgaaaaaacaaccgcgaaaacggtgaaaaaatcgatggaggacattacaaaaaaaatgaaaaccgaatacaaagcagatcttgccggattcggtaacgagctgaggatcaagcatccgaggctttgggaaaaactaaagaaaaattgggatgagacctttaccgatataccgattacatttcatgttcaaatcgcgattaaagaatacggaactgttggggatcagtaacagaagaacttctaatcacgaaaggcggagaaacgcgcaatgatccgttccgaagataaaatcacgacttctcaggcaatcgttgtcttggtcagttatattatggcggccgggattctcaccctgccaagaaccgctgtagaagaagccggtacgccggatgtatggatttccgtcctattaggcggacttgtcacaacggcagccggagtggttatgacaaagttaagccagcattatcccgggcaaacattttttcaatacgggggagacattgtcggaaagtggctcagtattgtgatcagcctgcttttcattgagcattttgtagcgattgctgcttttgaagcaagaattctggcggaggtgatcaccttttttttgctgcagcaaacgccgatttgggcgatcgtcatgtcgatgatgtggatcggattctattcaataaaagacggaatggggtcgcttgcccgtttgtttgaaatcatctttccgattacaattcttttctttttaaccgtggtatttatgagctttggcatatttgaactggataacctgcggcctgtcttagggaaaggcatcatgccggcattaaaggggacaaaagcaacaacgctttcgtttatcagcgcagaagtgatggtattccttttggcgtttatgaaaaagccgaaagatggtatcaaagtcgttgtcatgggaatcggcatcgcaatgctcttttatctaacaacgatcgtatttgtgatcggagggctgtcagttgacggggtgacagcgatgacatggccggcgcttgacctcatccgcagttttgaaatgcccggcttaatatttgaacgttttgaatcgctgctccttgtcatctggattatgcagctgtttgcgactttttccgtctcatattacgctgcatccctggggctctcgcaaattttcaagaaaaagagcagaccgatcatgttcggtctgctcccggtgatgtatttgctcgcgatgacgccaaaaaacattgatgatgtattttctctcggcgacatgatcggctatattgcggccgttttattcggcattgtgccgattccgcttttattggtttcgaaaatgagaaaaaagaaggcagtgcaaagctagaggttcagccggctttgttcacttccttttttgcgttcactttcaccctgtcattcggcatgaagaacaccagtaaaaaggcggccgctgctggggaaatcgcccaaatgaacgtgtgaacaatcgaatttgatagcgcttcggtgatgttatgtaaaacatccggcggcagtgatgcccgtgcacttgataaaatctggtcggcgtcattcgttgaggcgaaatttgaagcgccgctgcttttaaacatatcttccagctgttctgaaaattggtttttttgaatcatcccgaacatactggcgccgatcgtcatgccgagagagcgcataaagttgctcgtagatgtcgctgagccgcgctgctccgggccgaaatgatggatcgctgccatgcttaatacagagaaagaaaaaccgactcccaagccgacgacgatcatatacatggttaataataaacgcggagtgtcaatgttaagcgtgcttaataaagaaaatccgctgacgagaaccaatccagagatgagcataatgttccgatagctcatttttgttgttaagaatccgccaagctgtgctgatacgacagagccgagcatcatcggcaaaagcacaagtcccgagtttgtcgccgaatctccgtaaacaccctgaacaaagattggaatctggatggtcgctgaaataaatgtccctccataaaataaggcgacaagcgtactgccggcaaacagccggtttttaaacatatgaaacgaaatgatcggttcactggctttgcgctcgatcatgaggaagcaaaccaacaagacggctgcacttccgaaaagggtaaggatgacattcgaatcccaggcgtatttcccgccgccgagctccaacgcaaacatgaggcatacgaccgcccctacgagcgtaatcgctccgagccaatcaatacgatgcttttcatgctgtttcgtctctttgtaaaatagaagaatgaaaataaaagaaaccataccgagcggcagattcatataaaaaatccagtgccagctgatgtagtcagtgacataggcgccgatgagcggtccgaaaatgcttgaaaggccaaaaacagcaccgaaaagtccagtgatcttaccgcgcttttccagcggaaaaatgtcaaagataatcgtaaaagcaatcggaatgagcgcgcctccgccaattccctggatcgcgcggtatatgctgagctgctcaatggttgtagccgttccgcacaatgctgatcccgccatgaaaacgatgctgccaaaaagaaaaaaaacgttttctgccatacatatccgacagcttgccgaatatcggcataccggccatttcagcgaccataaaggcagatacaacccagacaaagctgtcgagtccgccaagatcgccgacaattgttcccattgccgtaacaacgatggtattgtccatcgaagccatcagaatggcaagcaaaagtcctgctacaacaaatcctaatttttgattttgagtttgtgacaaatcaatctattctcctttaaataaattcgttctaaagcagcgtttggcatcgacgcttcatcctgttatgatgatttatatcaggaaataaatatcttagctgctaagacataatgattttatagaagggtgttacagatgtcaagaacaaatcatattgaaggaaaagggctggtcaacgagctgatacagcagttgaggtttcacagcacagcaaccgtttttctgcaccaggcgatcggcgagaaaatcggactgaacggaacggatcataaatgccttgagatcatctcgcgggaaggtcaagtaacagcgggggagctcgccgcaaaaagcggactgacaacgggagcgatcacaggagtgatcgaccgtcttgagaaagcgggctatgtcagacgcatcagggattcgtccgacagaaggcgtcttttagtcgaactgatcccggaaaatctggagacgatatcacatatatttcatgacttggcgcaagagtctgccgaatttctaagccgatattcagaggaagaactgcaaaccattatcaagtttttgaaaaacagcacggcgtttgccgccgattatgccaaaaccttaaaaaagacgaagtgataaaagaccggttttgctgcaaccggtcttttttgatgttcatattttttcaatttgaactcttcctgaaaagaaagttgcaccaccgcccatatcagctaaacggtcgggcgtcagcgcattgacgagataatgcttcccttctgcatccgcccacaatccctggctgacggccacgcccggaaggacgttttctccgacggcagcgggcaggatgcatgagccgcggtcattccaaactttcaccaaatctccattttcgatgcccttttcttcggcatcttttatatttaagtgaagtttcggctccttttctaatttgatatgtttttcattgtttgaaaaggtcgaatttaaaaaattgtgattcgggccgggcacaaataaaaatggatacttgtccgtttcaatgagcggggtatgagtcggcaggcccggatagccgtgctgctccatcatttttgaatacaattcaatttttccgctaggcgtcggcagtttatcaggaaaaaccgtttttcgatttgctttgacaaaatgcttttcagtcaggctgtcatagtcaatgccatcgagccacggattatcagggtagtcaagcgcctgtctgatcatctcttcgtcggaatctttcagcggctcatcatcaaagcccatcgcctcagccaaaagcctgaatacttctgtatttgacttgctctcgccgtatttctcaatcacaggcttctgaatctgcgcataatggtgccaatatgatgtatagaaatccgtattttcgaaagcggaagaagccggcaggacgatatcggcgtaccgtgccgtttccgtcagaaatagatcgtgaacaaccgtgaataaatcttcgcgctcaagtccttttctgactttgttcgcctcaggcgcgacaacggccggattgctgctgtacacaaacagcgaacggatcggtggttcggtttctaagagagctttgccgagctgattcatgttgatgactctcggcgttctgccttttaataaatcggggcgctgcaatgcttttgtattataggccaaaaatgccgtgttgcctttgatcgctccgcctccttttttcgtccattggcccgtgatcgcgggcaggcacgagatggtgcgaacgatcattcctccattatcatgatgctgaagaccgttgccgatccgaatcaatgaaggggaggtgcggccgtacaggcgggcaagctcgataatatcattccgggatacgccggtgaccgcctctactgcggcggggtcgtattgccgcacgtggcggcgcagctcttcgtggccgactgtaaattctttcaaaaatgattcatcagccaaatgttccttgaataaaacatgcatgatgccaagcgcaagcgcgctgtctgtgccggggcgaatcggaataaaccagtcggccatccggccggtctgatttttatgaacatcgattacgacgatttttgcgccgtttttccgggctttttgagcaatggtgatttgatgcatgttggttgagaccgcgttgattccccaaaaaataaacagttttgtctccgttgtatcttcaggatcggtgccgatgcttccgcccatcgtgtatttatagccgacagaaccggcaggggtgcaaatcgcccggtcaagctggctggaaccgaggcggtggaaaaagcgcctgtccattccttcagccgtcaagtttcccatatttccgtaaaagctgtagggcagaatgctttcggggccttcctgttcaatgagcgactgccagcgggtgcgaatcgtttcaatcgcttcatcccagctgatcggttcaaacatcccggctccttttggacccgtccgtttcagcggggttttcagccgtttggggtcataaatacgctccgtcatattgcggactttattgcaaatattgccctgtgtgaccggatggtccgggtcgccctgtattttaacgatttttccgtcttttttatgaacgagcagcccgcattgatccgggcagtcgagcgaacatacggatttgaaaatcccgtctttttgatcaacatatgactccatggaatccgttcctttccgataaaatgaatatgattctagcattatatcacaaaatgtcgtcaattctgaaaataagagcggaagaatcccggcagaaaaaatgataaaaaaggatgccccgaggaaggacatcctttaagtttttggttattctttatcaaaatcaggcgcgaccgcttttttaataaataaagcggtaaagaaagcgatacagcttaaagcgagcgcaaaccagtaggcatggtgaacaccatgagtcatcgcttcatgcacgatttgtttgctggctgcttcttggccggcaagatagcttttctgtccctggctcatgatgctgacgaacaccgaaacaccgagtgcgcctgcaacaggctgaagagtattggaaattgccgttccatgaggatataaatgcttcggcaattcgtttaatgcattcgtctgtgcgggcatcatgatggccgagatggacagcatcaagatgatgtatacaataatgaacgcccaaatcggcaccgaaggattgatcctgctgaagaaaaacatcacgccgacgagaacgatcgtacctggaatgatgagttttctcgggccgaacttatcgaacaaagcgcccatagccggcgacatgagaccgtttagcaaggctccgggcaaaagcaaaagacctgctgcttttgctgaaaaaccgagcggcccttgcaaatacatcggcatcacaatttcggaagcgaacatcgccataatgacaatcacaaaaaggcagaccccgcgcgtgtaatttttataggcgaacacacgcacatcaagcaacggttgttcaagtttcaactgccgaagcacgaacaacacgatgctgatcaggctgatgatgatcacaccgatgatcagaggggactgaaacccttcctgagcctctccggcactgctgaatccgtatacgattccgccgatcccgatggttgagagtatgatcgataaaaaatcagcccgcgggcgcgtcggttctccgacattttgcaaatactttaccgcaaacagaattgaaaatactgcaaaaggaataacgatgataaacagccagcgccagccgaggatgtcaacaataacgcccgaaaaagtgggtccgatcgccggagcaaacatgatgaccagtccgaacgtccccatgattttcccgcggacttcaggccggtaaatcagcaagagggcgttcataataatggggatcaagagtcccgtaccgactgcctgaatcatgcgccccgtcaagagcatcgggaaattcactgcacaagcggcaatgacggttcctgctaaaaaaatcgacataacgccgataaacatctgtcttgtcgtgaaccattgaatcagtaaagcggaaataggcattaacacacccattacaagcataaatccggttgccagccattgaacggtcggggcatcaacgtgaaagacttccatcagctctgttaatgctatgttcaacagcgtttcgtttaatattgcaaaaaatgcaccaatcatgaaggtgactaatattgctttggaatttaaatttttctccatatcaaacctcctgtaatacaatttacccaaaaacatgacaacaaatgatatgtaggactccgaatctccggggtcctaatttgcttttttcgtttttcatcttatataataacgtgtctccaccgccgttcatcgtttttcttcatgattggcaactatatgagtatactcggtttcacccatatttacaataaaattgtcaggttcatcttttgaagttaacgtatggatgattatgaaatggcagggaagcgccatgagaaaaggcgggggaggaagggcattgatgatcctttcgtcaagccattccgttattacaggtatatttcacctgtttcgccggcggatgttctgactgaaaagaatcatgcccgaatccttcccctgatggataaaaaggtaagaactctccaaatctgaagagttcttttcatgcattgccgactcccgttttttgggcagcagccagcattacaataattcgatatacccttctgtgccgtgcacgcgaattcgctgcccatcttttatcagttgggtagcattctccactccgaccactgccggcaggccatattcgcgtgcgataactgctccatgggtcatcagtccgccaacttcagtgaccaggccttttatggatacaaataatggtgtccagccaggatcggtaaaggaggtgactaatatatctccgtcttccagatcggcattttccatgtttaaaatgacacgcgctcttccttctatcactccggaagaaacaggtagacctacaatcgcattcgccggcaaactttctcgtttgtaatcacctgtaatgatttcaccatcagacgtgatcacacgtggcggggttagtttttcatataatttgtactcgtcttttcgtatgctgatgatcttgtcatctattttttttgtgcgaacggcttcgtgaaattcttcaaaagtgaggtagtatatatcttccttttcatgaataacgcccgcttgtacgagttgatcggcttctttcagtaaagcctgcttataaatgaagaagcggctgaccattccgtattttggatattcccggtagccgatgaaattccggatgaggtcgatcattcgttttgtttctttggctttttgttcaccatcccgtaatggcttcaatcgctctattaactcttgttctttttccaaagcaacacgccgcccttgctcaaactttcgattgccggcattaggctcaaagttcttcatgttattcagaatcatgggaacaagtgtcattggtttttcactccaacgagctcttgtaatatcgatttctccggcacagcgcattccgtatttgtcaagataagcatagatggcgcccctagcttcctgtccgccatcaaccttcaccagctcatccaaaaagttatcatcttttgcatgctgcaaataatcaatcacttctggataagggcgaatcacatccgcgacatccattagcgccagacccatttccgaagtaatattacccggtacagatagagaaagagtatctgctgcgtttttttcgcctaaccactcgttcatgttttcattgatccatgatgtagcatttatagcagccataaacactgccgtactttgcgggtcaaataatatcttctttaattgccggatatcttccagaataaaatcaaacaaatccgatcccgatttcgcttggatattttgttttaactcttctatcgatgtttcactgcgcttaatcaaatcagaaacgattgtcggatcgttctcgaattgcgccagcatatccgtattccctctgtcaggaatcggtgctgtttgatcatttggtgacaattttatataatctcgctctattacggtcatgagtgcgccttttatgagcggatcggatcctacggtatttaataaagtttcccggccgatacgtgtagtaagcctaggcgcaacatcaacaaacaacctcccgccggccttgcgcataggtgctggagtaatgaacaggtaaaaagacaatcccagtggttttatgggatccgtcatcatttgctgatgaccgacagatagatagacgtgattttcttgatcattcgcttcagggatcgggtataaagtagtgatcggccggctctggacaatataaaatgtatcgcggtccaaacaccattcgatatcttgcggctggccgaaatgtgcttcgatctgtcttccgatgtgtgccagttgtaaaatttgcccgtcagtaagggcttgcgtcttttgctgatcaggcgtaatccgctttgtctctgttccgccttgttttcgcccataaatcgccaatttcttggctgctattctcttatcgacgatttgcccgttttgcactttataacaatcggcagagaccaagccggagaccagtgcttccccaagaccaaaaccggcatcgatggatagcagttttcggtttgaagtaatgggatcagcggtaaataatatccctgaagcctgcgggaaaaccattctttgaatgataacggatgaataaacttgacgatggtcaaatccattttgcatgcggtagatgaccgctcgatccgtaaatagagaagcccaacatttgctgatatgctgcaagatcgcatcttttccgatgatatttaaataagtgtcttgttgaccggcaaaagaggcgtgcggcaaatcttcagctgtcgcgctggaacgcacagcataagcatgttcatcgccaagcagggagagatagcgagccacttctttcacaacattggaaggaatttcgatttccataatggtatgtcgaatcttcctgctgatttcaccgatttgatctcgatcctcaactttaagcattgtcagttgatccaacaaggcttggaacgatttgttttgtttgatggctttttgaaatcctgctgttgtgacacaaaatccgtctggcacttgtatcccttgaatttttgataattcccctaaatgcaatccttttcccccaacgagtggaagctgtgttttttccatttcgtgaaaaccgagaaccaaatgactcattctgcatctctcctccgaaaaaaatttgacaagagctttttaatatggtagacttaaaatgtaagatgggatatttatgtcgtttaattgaaaacatgcgtgatttgattatatcatcgcgtctgtttttgtgcaataccaaaagaacctggatgttattaccaggttcttttttcttttcctcgtgcgagcagaaaaaacctcgatgtcggccggaaaagtttgctattcgacataacttaggggcaattgaattcatgcgtcctgcggattagtgccagctgcaccggccattcattcttcgcaagtcgtaatatttgcaaaagcgtattttattttcctataatttaaaacgtgctatacataatagaaaggaagtttttcatatgcaatccttacaaaacaaaaccgctctgattacaggagggggaagaggaatcggccgcgccacagcgattgccctcgcaaaagaaggcgtacatatcggccttatcggccgtacagctgcgaatcttgaaaaagcggcagaggaattgaaggcgttcggtgtaaaagtatctgtagccgcagctgacgtaaaggatttaacagctgtagaacgtgcagtccaatccgtcaaagaagagcttggacaaatcgatattctcattaacaatgccgggatcggcgggtttgcaggatttcttgagcaatctcccgaagaatgggaaaatattatccaggttaatctgatgggggtttacaatgtaacacgcgccgttctgcctgaaatgattgaaagaaaagccggcgatatcattaatatttcttctacagccggccaaaggggagcagccggcacaagcgcctacagtgcgtctaagttcgctgtgctcgggctgaccgaatcgctgatgcaggaagtcagaaagcacaatatccgcgtgagcgcccttacaccaagcacggttgcgacggatttggcaatcgactcaaaattgacagacggcaatccggaacgcgtcatgcagcctgaagatctggcggaatacatggttgcccagctcaaactgcatccgcgcattttcattaaatcagccggcatgtggtctacaaatccttaaacagcagggaaaggacaggtttgtaacagcctgtccttttttttcgcgctatttttgtgaaagttgtacggggagatggcggacgccgaaaacaaacggactttgaatcgcttcaagctccttagagctgtccctttccatgtatgcgcgccgcagcaagtaatcgagcgcgactttcgcttcaagccgggcgaggggagcgccgaggcaaaaatggatgccgaagccgaagctcatatgagggtttgatttgcgatcaagcttgaagctgtcaggatcgtcaaacttaagttcgtcacgattcgctgaagcgacccagctgatcactgtagaaccctttgcaatcctcacgcctccgatatcaacgtcttctgccgccgtgcggccgatcgcttgcacgggcggataataacgcagcatttcttcaacaaagacagggacgagggacggatcttgtcttacggcttcctgtgtgattttatcttctgtgagatagcggacgctgtttgcgatcaagttggttgtcgtctcattgcctgcgaccaaaagaatgatgcaaaaatgaagcagttcttcttctgtcagcgatttgccgtcaacttccgcccgcagtaaaagcgaaatcaggtcgtcttttggctcttttttgcgctgcttgataatgtttttaaaataatccgccaaaaaccgattgccttcttcacgtcgtttgtacatccgttcggcggcttcagccgagcggtcttccgcacctgcgacaaggatgtctgaataatgtttaaacatgaggcggtcttcagccggaacgcctaaaagttcagcgatgataatgacgggaagaggagcagccaagtcgtccaccacatcaaacaattctttctgtttcgcttcgttaaataaaaaagccgtcacttcttcgatatgcggttcaagctctttcaccgctttcggcgtaaaagctttattaacgatggctctcatttttgtgtgtctcggcgggtccattgttaatatactttttccttccatattaccgccgcgttttgaagagaagagcttcgggttttttaacacgaattgaacgtcttcataagaaaagatatcaaagcattttcgctcatcatcgtaacgcacaggagacgtctttctgatccggttataaatcggaaacggaaacagccggtcattactcgagctgatttctttcatcggaatccaattggcataatgcttgcttgattgaagtgaatttgaatttgccacagtcaactctctcctttaaatgaaacgtttatactttatgagccggttcaatcttaacgttatcactatttttataacggtttcaacggacatacaatgaaaaaattgtcaattggccgaaagtatcggatctaaaaaaggaaaaaaggcgaggtatgcttaaaaaagcgggaatatcagctaaagagatggatgaaaaaagaggccgcacctgatcaggtgcggcctcaatgttagctgacggcttcttcccgggagaactggctgttatacaaatcggcataaaatccgttcttgcggagcagctcttcgtggctgcctttttcaataatatctccgtttttcatcacaagaatcatgtcggcatctttaatggtagaaagacggtgggcgataacaaagctcgtacggttggccatcagtttgttcatcgctttttgaatattcatttccgtccgggtgtcgacactgcttgtcgcttcatctaatattaaaatcttcggatcagctaaaatggctctcgcgatcgttaagagctgccgttgcccttgcgagatgttttgggcatcttcgccaagtaccgtatcatagccgtccggcaaggtgcggataaaatcgtcggcataggcgccttttgccgctctgatgatgtcttcttcggtcgcgccttcacgcccgtaagcgatgttttcccggatggtgccgttgaacagccatgtgtcctgtaacaccatcgcaaacatgcttctcgcctgttcgcgcgacagctcgctgatatctgtgccgccgaccttgatgctgcctttgtttagttcataaaaacgcatcagcaaattgatgatcgtcgtttttccagcgccggtcggtccgacgatcgcaatcgtctggccttctttggcgtgaaggcttaagtcgcggatgaccggaacgtttttatcataaccgaaggcgacatgttcaaacgatacatcgccttttaatttgccggtatcgatggaagccggcgtctccccggtttcttcttcttcgtccaaaagactgaacaccctttcggcggatgcgattgccgattggattgtattcgcgattccggcagcttgaacgagcggctgggaaaattgctgcgtatattggataaaagcctgcacgcctccgatcaaaagggtgccgttaagaacgaaaataccgccggttatgctgacaaacacatagccgaggttgccgatgaatgtcatcatcggcatcatcagaccggaaataaactgcgctttccagcctgactggtaaagacgctcatttacttcatcgaattgctgaatcgctttttcttcatgcccgaatgcctttacttcctgatgccccgtaaacatttcttcaacgtgtccgttgatgtcgccgagttctttttgctgcgcggcgaagtgtttctgcgaaaatgaggcaatgaatcggacggccagcatgctgagcgggaccgtgatgaagacgacgagcgtcagcacagggctgatcaaaagcatcatgacgatgattccgactattgtaatgacagacgtaatcatttgcgtcagcgcctgctgcaatgacgtattgatattgtcgatatcattgacggcgcggctgagcgtgtcgccgtgcgaatgcttgtcatagtactttaaagggagccgcgtcagcttttcattcacttcctggcgcatttcgtatatcgttttctgggctaccccggccatcaggtaatgctgcaagaacgtaaacaaagcagaaagcagatacaatcctgccaggatcagcgtgatccggccgagaaagccgaattgaacaccggtgccttctttaaagcttgcgaaaagggaagaggtcgcgtccccgagaagttttggactgatgacattaaataatgtcgccaatattgcagcgaagacaacgagcaccagctggaaggtccgcggttttaaatagcgggccaatctcaaaagggtctttttaaattctttcggttttgtcttgtgcattcctttgggtatagagccgtgatgctttggttgttggctcatgcgctttcctcctcagcctgctgtgatgcgacgatttcctggtaaatgccgttttcagcaagcaattgttgatgagtgccgatgccggctatttttccttcatttaaaacgatgatttgatccgcatccgtaatcgtgcttaccctttgggcaacgatgatgacggcggcatcagcggttgttttcttcagcgcttttctcagcttttgatccgttttgtaatcaagcgccgaaaagctgtcgtcaaataaataaatttccggttttctgactaatgccctggcgatggaaagccgctgtttctggccgcctgaaagattggctccggcctgctcgatttcagattcaattccgttttccttgccttctacaaactcggcagcctgtgccgtttcaagtgcttccagaatttcttcatctgttgcatcttctttgccaaagcggatattgtctttaatcgtcccgctgaatattgaagctttttgcgggacatagccgattttcgcgcgaagctccttttgcgccatctttctgacatctgttccgttgactagcacagttcctttttcaatatcgaaaaatctcgggatcaattgaagaatcgtcgtttttcccgctcctgtgctgccgatgatcgcagtcgtctcacccggctttgccttgaacgagatatcttcgagaacgggcttttcggccccggcataacgaaaagtcacattctgaaactcaacataaccgcgcaagccgctgtctttctgcggctctttcggatcggtaatcgaaggctctgttaacagcacttcattaatgcggccggcagatgcctgagcccttgggatcatcacgaatgtcatcgcaagcatgatcagcgcaattagaatcatcgatgcatattgaaggaaagccattaagttcccgacctgcatgctgccttgatcgatgcggatgcctccgaaccagataatcgcgatgttcgtgaaattcatcataatcatcatgacagggaatagaaaagccatgattctgttgacggcgatgcctgtatcgcgaaattcttcgttcgctttttgaaaccggactttttcttgatcaacgcggttaaacgcgcgaatgacacgaacgcccgtcaaaccttccctgagaacaaggttgagacgatccgtctttttttgcaggacgccgaataaggggacagcttttcttgtaatgagaaaaatcagccctgcaagtatcgggagagcggccagaaatataatcgacagcttggcatctctggaaaccgcaagcacaataccgccgaccagcattaacggcgctctcgtcatcaatgaaagcatcatgttgagcacatcttggacctgcttgacatcattggtggtacgggtaatgagagaagcagaactgatttttccgaattcatccattgaatggtgttcaactttgacaaacagtttgcgcctgatatctcttccaaagccgagggctgttttcgaagcgaaaaacgcttttccgacagtcatcatgatggccagaagggagcaggcgatcatccagccgccggttttcaaaataaatggcatatcactgtttacgattccgacatcaacgacatcagccatcaacgtcggcaaataaagctcaagcacactgctcagcaaagtaaaaacagcgacgagaatcacttgcagcttatagggctttaaatattttaagagtgagatcatttttcaaccttcttttcacttgttttttctccttgttcgataaactcggacagcttatgaatcagatcggcgaagtgcctgctttcagcctcgcccagaaaccgcgagagctgcaagaaccatcggttcaggcctttaagcgcatcgtcagccgctttttttccttcatcggttagaaaaatccggacgatccgcctgtcatcctcatctatgcgccgtaaaacgagtccttttttttccattctgttcaacagctgcgtgacgaagggggaggtgacatgcaaagcgcggctgatttcggatgccatttttccttcaccgtttgcttcatttaaaaacatcagcgctttcgcctcagtctttttccattcaactgaaggaaatgactgtttcatttccgcataacgcagcctgttgaaagcttcgatcaactgctcaacggtctcgcggccgactttatcttgtttcataaaagcacctgcttctccattttaattaattaagtaaataaactaaaacacggtattatcatacatagaacaacaaaagaatgtcaaagaagaaacctagaaaaaaagaaaaaacccgatcattgatgacatgaccgggtcattgtacgagcttcattaaaaaatccttcagttcaaggtggcgaaggtgagccggaacttcttcggaaccgacgatgatcatcggagccaagctatccgttttataaagtgagccatggccgcctccgccaaaatggaggggagacttttctccggcaaattggaatccgggtttcgcatcggcaattacaaaccgtccgcgatgcgaatgcatggcgctgtacaggcgggcaagagcatccgggtaatcgccatacatgatcgatgcaccgtccgttttaatgtccaataaggaaaaatctccgctgatcgtccatgactgcccgtaaggatcttgataaccgccttgcggacgaaaccgcagcggttttaaggaacgcttcgaatcgacgtatatccagccgtcttttttccacgctgtgaaagcgatccgtccgtcttttttcaattcattgacggcatcttgcagcggcgtgttttgatccgttacataaatgtatgccattctgtcgtttaccgcaaaaagaagctggtcttttcgatctgggccttcgtttattttagcgatccgatatcctttaaaaagcgaatggagccggatggctgccttatctttatcgcgtccgatcgatgtctgtccgccgtctcccatgacgacccacaccgctttttcggccgcatcgcgccaagaatcatatgcattcaatatacgctgcagctgacggtccattttttcgaggccttccatatccttcgggccttttttgtgtgcatcgtggtcgaaatcgggcaagtaggcgacagtcagcgcaggaagcttcctctttttaatcaaataagccatttcctgcgccgtgaacttgtcgttaacgccataaccctgccaaatatggtggtaggagttgtcgggatcaagctgggcaaagcggccgtacgaaaaaagagccggcccgtttaccgtcatatgttcaggcatcagtctaagcttcttgagcgggggcggtatgtttaattcgcggcggtcaggtcccctgtatatgagcccgttgatggatgccgactgttttccttgcttttgcaaatcttcatgtaccgttgtcacctttcggtttaaatggcggtgattgagagaatatatcccgtcttcgatcgtttgtttgaggccgagcgcggcgatttcttttttatcgctcccgtaattcacaattctctgtccagcctgattataccagacaagcccgggaacgcggtggatattcggataagttccggtgagcagcgtgctgtcaatcgcgaccgacatggtcggatacgcgctcgccacttcaggttcataatgaccgttttcaagaaagaattttaatgccggagcgcggccttcttgaatcgcttttttcaaaggctgatccatcaaagagtcgatgatcaggacaatgaccggttttttagagggtttgacggcctctgcttcttcatctgagagccccaatttttcatccccggcattcagccatatgatgaatgaaaccagcgcacatatgaaaatgacaagtacaatgcttagctttttcaaaatggcctcattcctttaatcccattgtatgcatattctggcatggggcgccggaagttatagctggtaataggttctaaatgaattacgccagctcttgggaagcctattcaattagaaaggagggaaaatgatgaataaacataagtggttagccgcaattgctatcatcgcaattttagccgttattggctatttcacggtcagacaccttgaaccggaatatgcctatatgcctcctaaagaaaaagtcatctcaaaagaaaaacgattgcacggatacgatttatggggggcatttacaccggataagcccgcgtccgcaggggagggagctgtaaaggttgatgaccgccttcttgacttgggacgtgagacattttataaggaaacattcggaaacgaggtgtttttgacggatatcgtcggactgcttgacggtcccattacagctgccaacatgacgaaagccattgctggattgaaagggaaagggacgacaaacttgcgcatcgaattggcggaaacggttaaggtcggcgggaaaacctttaaaaaaggcgagaagatcgacaccggcattgatgttgcaaaaggggcatacgcgccccttggcatgccttttaaatacgctgacggaaaaatcaaagccggcatcagctgtgcggcctgccacgccacagttgattcgaaaacgatgaaggtgatggaaggcgtgacaaactcagatttaaatacagggctgatgctggcgctggcgacgaactcagctgcatattttacacatgccgaaattcataatattaaacaatttatgaatgataaaagccctgtgatcaccgcaagaaacggcaaaaaagaacgcctccccgatccggaccgcctcgaagatgcagtcgatcgtattttcctgaagtggccgagaggttttttcgattcaacgatcgatatgaaaagcaatcccacgcagattccagatgcctatacattgggcgaccatccgtacagctggagcggtgtggcaatggccgggccgtttaaaggcttgactgtgttcagcaataatgttcatgcgcaaaattcggacagcctctcacaatctccggcaagccgggcgcttttcggaatgagcgaagatgtttatatcgggacgatcctgcaaagggctcccgcctcaacatacaggtatcagccgaaaaaaggggaaagtccgaccgcgtttttcaaaaaagcagaccccactcccggagtaccgggcgtcaaccaaatggtcaagccgccgagctttcctaaaatcactctggcggcgcccgacggcgtgcatgtgagctcgcccggacgaaatgtaaatgaagaaaacaacgctgtgtctgcctggcaaaatacacttagaccgcctgaaccgcggcaaaaaaccgacggccaaaccatcaggcgcggcaggcgcgtttttgaacaagcaggctgcatatcctgtcatgccggccggtatttgacgaacaacaaggtcatctcggctgaaacgatcgggaccgagccgacaagggcgcagtcttttaagaaagcagaaagcatattcgggaaaagccttgtccattcgcctgacacaccggtgcctctgccgcgcaagccggaggttctgaaagtcccgacagccggatttgaccccgaacagatcaagctttcgtgggcgcagggtgattccaaaggcgggtataaagtgccgagtctgattggcgtttactggcgcgctccttatttgcacgacggaggggttgcagttgggagctcattgaaagaaacaggcataccaaagacgattatcaaaggtaagccggcgaacccttataacagtttattggcgatgatcgacagagacttaagacagaaggtcatcaaaagcaattcggaatcgcccgacttaaaagcagtcagagtaaccggcaaagggcatgaattttggatcgacgccaaaagcggcttttccaaacaggagcaaaaagcgttgatccattatttaatccatgccgatatgcctgaaaagcaagaaataaaatgaaaagaaaagccgcctgactggcggcttttttaaaacctcgtcaccgcggcggcgcttaaacccggaagatgatcgccttttctgtccttgtaacggagcagcgcggatgcaacccgccttttgcttcagctgttttgacaagcccaaggccggcaacggctgcggccggtgcggcatgtccgttccaagagaggagaccttcatgagctgcgttaagcgcaatgtaaagaagggcaaaccatttgataaaacagggatgaacatacatctgtaagacgcgctcattataatagaagagacacggccgcaaacaataaagggcagaaaattcagacatttatctttatttatgataaaataaaatcagccaagcttttgcgcccggctgatttcgttgcaagactgttattgatattgctgaaggcgagaaaaaaacttctttacgaactgataaaagacttttgcagaaggggaaagctccctgtttttaggggtgatgatcccgaccgtgcgctttacctgcggataatcaatcggaatcttctttgtaaaacggggtgccgtttcattaaaggcgctttccggcaaaagcgtcacccccatatcagcagaaacaagccctttgatcgcatccaaatcttcgccctccgaggaaattttaggcgtatatccgacttgcttgcatgcgtcaacagccatttttcggagaatgtacccgtcaggaaacagcacatactgatcatttctgagatcgccgagatgaagacttttctggcctgacaacggatgattgaccggcacgagcgccagaaggctctccgaaaacaaaatgtctcctttaatctcggcaatgtttgacgggacgggaccgagaaaagccaaatcgatatccctgtttttcaccgcttcgattaaaaatttataagatccctgtcttaaaagaaaagcgacattaggatgctcctctttaaaagcggaaatgacggtcgggaggaactggcccgcaaggcttgtcgggaaaccgattttaacggtcccgcgattcgggtccaaatactcgtcgatttgttccttcgcaaaatcgatcgctttcatcgccgttttaatatggtctaaaaactgcctcccaatcggagtcagcttcacattccggccttcgcgctcaaacaaatcaacgccgagctcttcctctagattggcgatctgcctgctgatcgccgactgagcgacatgaaggtgcatggccgcttccgatacatgctctctttccgcaacttccataaagtaatgcaattggcgtaattccatcgttgtttcacctgctaatctcaaaatgagatagttttaatctaaattatatattgtttgtatagatttgaaaacctacaataggattagagtttgtaagattttatgaccggggacaaacgggaaaaatgaacgggggagaggaacaatgacttataatcaactaccaaaggcacaaggtctctaccgtcctgaatttgaacatgatgcatgcggaatcggcctttatgctcatttgaagggccttcctactcatgatattgtcaaaaaaggattgcaaatgctttgccaattggaccaccggggcggtcagggcagtgacccgcataccggagacggggcaggcatcatgatgcagattccggatgctttttttaaaaaagtctgcgccgatttcaacttgcctgaaaaaggacgctacggcgtcgggatgatcttcttttcgaaagacgacagcgggcgcgaaaaatccgaagcgcgcattaacgagctgatcgaacaggaagggcagacggtactcggctggcgaactgcacctgtaaatgtcggaaaaatcggaacagtcgcacaagaaagcgcgccagtcgtccgccaggtatttatcggagcaaatgaagcgctgaaagacaatttggcatttgaacgcaagttgtacatcattcgcaaacaggccgaaaattgggcaaaagaacacgagaaaacgttctatttcgtcagcctctcgagcaataccatcgtatataaaggtcttttaacgcccgagcaggttgatgccttctatgaagatttgcaagacgaggacttcgtctcggctttttctttggttcactcccgtttcagcacaaacacgtttccgagctgggaaagggcgcacccgaaccgttatttgatccacaacggggaaatcaatacgctgcgcggcaatatgaactggatgaaagcgagggagcagcagtttgtttctgaagcgttcggtgaagacttgccgaaggttttgccgattctcgatgaaaatggaagcgactcctcgatactggataacgcttttgaattctttgtactggctggaagaaagccggcccatgctgcaatgatgctgattccggagccgtggaacgagaacccgtacatgtcaaaagaaaagaaggcattttacgaatatcacagctctttaatggagccttgggacggcccgactgcgatttcttttacaaacggaaaacagatcggagccattttagaccggaacggactcagacccgctcgctattatgtcactaaagacgactaccttattttttcttccgaagtcggcgtaattgatgtcgaacaggaaaacattttatataaagaccggctggatcccggaaaaatgctgcttgttgatcttgaagaaggacgtattatctccgatgaagaagtcaaatccgaaatcgccggagagtttccgtaccaggaatggctcagtaaagaactggttcatgtctcaaacgacattgaggaaaccgaagaaaaatctgtgcctgatctgctgacccgccagaaagcattcggttttacgtacgaagatattcacaagtatttaattcctgtcattacagaaggcaaagacccgctcggttcaatgggtcacgatgtcccgctggcggtgttgtcagaccgtccgcaatcgctgttcaactattttaaacagctgtttgcacaggttaccaatccgccgattgatgcaatccgcgagcagatcgtcacatcgacattgacatggctcggagcggaaggcgatattctccatccgaacgaaagcagctgccgccggattaaattgtatacaccggtcttgacgaacgcgcagttcaattctttaaaggggcttgtacacaaagatttcaaaagcaagacgattcacacgctctttacagacgacttgaagagcggactcgaagatatgtttaaagaagcggacagagcgatcgccgaaggcgtgacactccttatcttatccgaccgcaaaatggacggtcaaaaagcgccgattcctgcgctgctagccgtcagtgccttgcatcaatatttggtccgtgcaggaaagcgcacaaaagtcagcattatcgcccaatcgggtgaagcgcgcgaagttcatcattttgccgccttgatcggctacggagcggatgccattcatccgtacctcacatatgcgacatacaagcaggcgattgaagacggagcgctctccatcagttatgaagaagctgtaacaaaatacagcaaaagcgtgacagaaggcgtcgtaaaagtgatgtcaaaaatgggtatttccacagtccaaagctacaggggcgcacagatttttgaagcggtcggaatcagcaaggacgtcatagacagctatttcacaggaacggcttcacagctcggcggaatcggtttggacacgattgccgaagaagcgaagcgccgccacagggaagcttatgaagatacattcagtgaaacgcttgattctggtagcgattttcaatggagaaaaggcggggaacaccacgcttttaatccgaaaacgattcacacgctgcaatgggcctgccgcaaaggtgattacagcctgtttaaacaatattcgaaagcggctgatgaagaaagaatcggttttctccgcaacctcttctcgtttgatgaaaaccggaagccgctgccgcttgaagaagtcgaatccgctgaatcaattgtacgccgctttaaaacaggggcgatgtcattcggctctttaagcaaggaagcccatgaagcgctggcgattgcaatgaaccgtctcggaggaaaaagcaacagcggggaaggcggagaagatccggcgcgctttacgcctgacgccaatggtgataaccgccgcagcgcgatcaagcaaatcgcttcaggccgtttcggtgtgaaaagccactatctcgtcaatgccgacgagctgcaaattaagatggcgcagggtgcaaaaccgggggaaggcggacagctccctggcaacaaagtgtatccatgggttgccaatgtacgcggatctacgcctggggtcggcttgatttcaccgccgccgcaccacgatatctactcgattgaagatttggcgcagctgattcatgatttgaaaaacgccaaccgcgatgcacggatcagcgtaaagcttgtcgctaaagccggagtaggcacgattgcagccggagtcgccaaagcgacggccgatgtcatcgtcatcagcggctatgacgggggcactggagcatcaccgaaaacaagtattaagcataccggcctcccatgggagcttggactcgcagaagctcatcaaacactgatgatgaacggtttgcgcgaacgcgtcgtattggaaacagacggaaaattaatgacgggcagagacgttgtcatggctgcgcttttaggagccgaagaattcggttttgcaacggcaccgctcgttgttctcggctgcgtcatgatgagagcctgccatttggatacgtgccctgtcggggtagcgacgcaaaaccctgagcttcgcaaaaagttcatgggcgatccagatcacatcgtgaattacatgctctttgtcgcagaagaagttcgcgaattgatggcccagctcggtttcagaacggttgatgaaatggtgggccgcacggatgtcctgcgtgtcagcgaacgggccaaagcgcattggaaagcgggtcagctcgatttatcaagcctgctttaccagccggaaggcacacgtacattccgtacgccgcaaaaccataaaatcgatgaatcgctcgatgttacgcaaatcttaccggccgtgcagtcagctgttgaaaacggtacgcctgtagaagcgtcttttgaaatccgcaacatcaaccgtgtaacaggagccataaccggaagcgaaatttctaagcgctacggcgaagaaggtctccctgaagatacgattacgctccgattcacaggttcagcggggcaaagctttggagcgttcgtaccaaaaggaatgacgatgtatttgacaggagatgccaatgattacatcggcaaaggtctttcaggcggaaaaatcgccgtcaaagcgcctgacgaattcaaccctgcattccgtgaaaatgttattgtcggaaacgtcgcgttttacggcgctacaagcggagaagcttatattaacggactcgcgggcgaacggtttgccgtcagaaacagcggagtcagcgttgtcgttgaaggcatcggcgaccatggatgcgaatacatgaccggcgggcgcgtcgccattctcggagacgtcggcaaaaactttgccgcaggcatgtcaggcggaatcgcctacgtatacgccgaagacaaaaaagcctttaaacggaaatgcaatcctgaaatgatcgagtttgaaacacttgaagcacctgaggaaatcgctgaactgaaaacgatgatcgaaaaccattacaaatataccgaaagctcaaaagcagcttcgatactggatcattgggaagaggccgtcggtcggtttgtgaaagtgattccgaaagacttcaagcaaatgatagagcggattaaagagcagaaagaagccggcttgtctgatgaagaagcgttgatgtacgcgtttgaagccggtacgaaacaaaagattgaaccatctgcggctgcttcatcaaaagaagcggtggcacagtaagaaaggggaggggaaaatgggcaaagcaacaggatttatggaattcaagcgggaaaagcctgctgaacgcgatcctctcacacggataaacgactggaacgaatattcgtctccattttctgaggaagcatcaaaaagacagggagcgcgctgcatggactgcggcacccccttttgccaaatcggcatggatataggcggttatacgtcaggatgtccgattcacaatttaatccctgaatggaacgacctcgtttacaagggaaggtggaaagaagcgcttgaccgccttctaaagacaaacaatttccctgaattcactgggcgggtctgtccggcgccttgtgagggctcttgtacggtggcgatttccgatccggccgtatccatcaaagggatcgaacggacgattattgacaaaggatttgaaaacggatggattcagccgcgaattccgaaaaaacggagcggcaagaaaatcgcgatagtcggctcagggcctgccggtcttgcaagcgccgatcaattgaaccaggcggggcattcggtcactgtttatgagcgcagcgaccgcccgggaggcctgttaatgtacggcatcccgagcatgaagctcgaaaaaagcgttgtcgaacgccgcatcaaactgttgacacaggaaggcgtcgactttgtcaccaatacggaaatcggcaaagatattacagccgacgaactaaaagaacagtacgatgcgattatcctttgcacaggggcccaaaaacagcgcgatctcttgattgaaggccgtgaagcaaaaggtgtccactttgccatggactatttaacaggcaccattaaaagcatgctcgattcgaattttaaagataagcagtttatcaatacgaaaaataaagacgtcatcgtcatcggcggcggtgacacgggggcagactgcgttgcaacggccctgcgccaaaaagcgcgaagcgtcgtccaattcggcaagcatccgaagctgcccgatacaaggaccgccgaaaatatgtggccggaacagccgcatgtccatacgctggactatgcctatgaagaggcgcaagcagtattcggaaacgatccgagacaatattcgatccaaacaaaaaagcttgtcgcagataaaaacggccatttgaaagaactgcatacgattcaaatgaaaaaagtaaagaatgatcaagggaaatttgagttccacgaaattccgggaacggaaaaagtatggcctgctcaatacgtctttatcgccatcggctttgaaggaacggaacagccgctgcttgagcagttcggggtaaatacggtgagaaataaagttgacgcagcatacggggaatttaaaacaaatgtcgatggagtcttcgcagcaggggatgcgagaagaggacaaagcctgatcgtttgggcgattcacgagggacgcgaagtcgcccgtgaagttgacaaatatttaatggggagctctgtactgccttaaaaacaaaggggtattcacatcatataaatgaaagcctgtcccgcgaccttatttttaggttgacggggcaggctgttttgtttttttgattcagtgctttcgccttctggctgatcttcggactgccgcccaaagttatctgtgaaaaattgtgtacttactccattttatgggatatagcataacctaaagtatgaaaagcaactaaaggaggctataacagtggaagaaacttatcaaaatcaagataactgggcggatccggatagacagcagccttttacttatgggggctacccttatccgcggccaagaccgcgccctagaccgaggccgccgttttatccgtatccattcttctatccgttcttttatcctttttatcctttctacccttacccttggtaatttgtaaaacgaagctgtctggtgaagcaggcagcttttttcattttgatgaatttttcaaaacgcttccacgaataataacagcgatatgataaaagctctctatatttccaaaagagaacaaaatggatgtggtattcgtgtcgttattcgtcaaaaagttgagcagagaaaagcgatatttgattttcgcattcagtgtcattcttctctatgtccttccgctttacatattaaatgaagacgctcatatccgtgtgcatgacaacctggattccaatatcgcctggtataaggtgctggccgaaagcgggcagctgctcggcggcgttaaagccgtcattccgcaaatcatcaacgggttgccgcgggacgcttacggaacggaatggagcggcattgtctggcttcacgccttgtttccttcgatgaccgcatatgctttaagccagacgatcacgagggtgtttgcctttgtcgggatgtacctgctgctgaaaagccatgtgattcgcgatgaaaaggcgtatttcatcagaatcgccgtatcgctggcatttgccctgacacccttttggccttcaggaatgcttagtacgcttggtcaccctttggccttatgggcttttttaaacatcagggcagggaacgactcatggaaagagtggtcaacccttgcgcttttaccgctttactcaagctttgtgctcggtttcttctttttccttgccgccgtttcgctgatttggctttatgatttggtcacaaagcgcagctttaaccttcgctttctcggaagtatcgctcttatgacaggcatattcctggcgatagaataccggcttgtttattcggttttcgcttcaggcgaaacgatgcatcgcgttgaatttatttcgtccaggcatgacatccttcattcgtttcggttgtcctttaaaaatttcgtgctcggccacaatcatgtcatgaccgtccatacggcagtgatactgcctttgattgtgctcactttcgggctcgtcgttgctagacaacgcaaaaagcggccaagcgaagaaaagctgttcatctttttattcattttaaattatgcgctttctttatggtatgccctctggttcaacaagctgtgggcgcttccaaaggaaaagatcagtctgctttcggcattcaatttcgcccgtttccactttttgcgccctcttgtgatatacgcaagctttgccgttgcatgctacatattgtggaaaatggggaagagatggcggcgttttgttcatgccgcactaatcgcccagctgcttgtgcttattccgtttcatgaagagctgacttacggcgcataccaccacgccccaagctttcgggaattttatgcatcagatcagtttaaacagatcaaacgattcatcggccgtcctaccgattcctaccgggtggcgagcatcggcctgcatccggcgattgcgcagtataacggcttctacacacttgatacgtatgccaatatttatccactgaaatacaagtatcaattccggaaaatcatcgccaaagagcttgataaaaatccggccctgaagcgctatttcgatgagtgggggagccgctgctacttgtttgttgacgagcttggaaaacattacgcgttcaaaaagagcacaaagaaaaaaatcacgaacctggagttaaacactgaagcattcaaaaaaatggggggacaatatattttttcttcagttccgattatgaatgcagaacaaaacaagcttgcgtttttaaagcggttcagccacccgcagtccgcttggaacatctatgtatatgaagcgaaataagcatcgataaggaggaagcaaattgaatcttcaacagcctttgctgacgatcgtcgtaccctgttataacgaagaggacgtgtttgccgaaaccgcaaaacagctgactgcggtattggatgatctcacagcagataaactgatttcttcagagagcaagcttttatttgtcgatgatggatcgacagaccgcacatggccgctgattgccatggaaagcacaaaaaaccgctatgtgacaggcttgaagctggcccgtaattcgggacatcaaaaagctctgttagccggactcgataaagcaaagcaaaaatccgattgcgttatttcaatcgatgccgatcttcaggatgacatttcggcgattcgccggtttatcgaaaaatatcatgaaggctatgaaatcgtctacggtgtacgccgaagccgccaaacggatacatggtttaaacgaacgacagccggatggttctacaagatcatgaataagcttggcatccagctggtcgataaccatgccgactttcggcttttaaataaacgggcgcttgaggagctcagccgctatgcagaagcaaatgttttcctgcgcggtttggtgcccctgatcggccttcggtcggcaaaagtgtactatgaccgaaaagagcggatggctggagaaacgaaatatccgctgaaaaaaatgctgtctttcgcttttcacgggattacgtctttcagtgtcgctccgatccgattttttaccctgattggcttcttcttatttttcctaagctgcatcgcgggtatttatgcaatgattcaaaaactgctcgggtatacgaatgcaggctgggcttcgctgatcatttcgatatggtttttgggcggtctgcaattgatggggatcggcattatcggcgaatatatcggaacgattttcaccgaagtgaaaagaaggccgagatatgcggtggatatcgatttgtatactgaacggctcggccggcgcgaacctgaaaaacggccggaaacgaagctcagctgatgacggatgcaacccgagcagttaactccaattttatagttcattatgaataaggaaggatgtacaaacttatggcagaaaaacaaaactctggcatgacggttgttgctatcgggtcgatcccgttgattatgacgttgggaaattcgatgctgattccgattttgccgaaaatgaaatccgaactcaatttatcgcaatttcaagtcagccttgtcattacagtgttttcgatcactgcagcgctctttattccgctgctcggttatttggccgaccgcttctcacggaaagtggtgattattccgtgcctgttcctttatggggcaggggggattcttgcagggtttgcatcgacgacctttgcgaatgccttcccatgggtgctgttcgggagaggactgcaagggctcggggcagccggtacagcgccgatcgcaatggcgctgacaggagacctttttaaaggggccgacgaaagccgggtgctcggtcttgttgaagcctcgaacggcttcggaaaagtgctgtctcctattttaggatcattgattgcattaatcgcttggttttgggtgttctttgcatttccggctttttgtattgcgccgatcattttgacttggatttttattaaagaaaaagacaagaaaaaagatccgccgcctcttggaaaatatgtaaaagggctgacaagcgtttttaaacatgagggcagatggcttttcaccgcatatctcgcaggagccgtctgtttgtttactctgtttggcatcctcttttacttatccgatgttttggaaaaagaatatcatacagacggcgtaaaaaaagggctgattttggcgatccctctgcttgtgatgtgtacaacatcatatattacgggcagcaaaatcggacaaaatcagcggctgatgaaaaagatgatggtcatcggactcgctctgattacggtttcctacggcacactgtcttttttctccgcgctcattccttttatttcgatccttgtcatcagcagcatcggcacaggctttgttctgccatgtgtcaacagcttcataaccggggctgtcggaaaagagaggcgcggctttgtgacatctctgtacggttcggtcagatttttaggagtcgccatcggaccgccgattttcgggagactgatggaatggtcgaaactcggcatgtttatgtccatagcgggcctgacgttgattgtcggtgtacttgtgctgaccatgattcacgtcaaaaaggaagacacgacaaaaaaaggggacaaggggctgcagccggctgacgcaagataggaggaaaggaaaaaacatgcgcatagaaaaggttgacacatttccgctgttccacaagctttcctccccttacggcgatgcgaacggattgaaaagctacagaacaagctatctgattcggattacgacagcttcaggtctgacaggatggggagaatgcgcggattggctgcctgctttggatgcaggctttaaaaaacggatcattccttatttaattggaaaagaagcgagcaatcgaacggagctgatcactgtcatcaaaaaatggcatcagcgggccgcctctgctgtaagcatggctttaacggacatcacggcgaaaaaagcaggcctttcggtatgcgaattatggggaggaaaactgcgggagcagatcccggtatatgcgtcattccaatcgtattcagacaggccggattggagccgccattccctccggcttatcgaaaaggcagttcgggccggatttaaggcagtcaagctgaaagcgggaggcaagatgttttcagaagacttggcacatattcaggccttccaggagatgacagggcaaagcaccggactgatcctcgatgcaaaccagagttatgatcaggccgccgcgcgcaagtgggaaacgtggttttccggctggcaaaacgtgctttggtttgaagagcccatgccgtttgacgacctagctgaataccggatgctgcgctcagcgctttctgttccggttgccggaggagaaaacgtaaaaggcgcaaagccgtttttgccgatttttctggagaacgcagtcgatattgcccagcccgatgttatgcactgtgagggcacggacgaatttcaaaccgttctgaagctcgccaggcatttcggaaaaagggtctctccccacagctatgacggcggactttcaagaatatacgccgctttcggacaagcctgtttaccgcattggaccaaaatggacggagaagatatcgaaccgcttgaatgggatgcgatggagaatccgttcgcacaaatcgtgcccgtcagcataaaagacggctgcattcaagtccccgacaaaatcgaaattgatacagagctcgtagaagcgtatgtgtgggatggctcgtcttacatctgatcagcgtccaccccgaaaaaatgtgatatttttcatttccccttacatatagtaggaaagaggacaagttactttaaaggggattatatccgtatgggaagaaaactcaaaatcgtacatgctattgtgttgggcagcgtgttgcagggtctcggtatggcgctgtttttgtttccgaaccatattccttcagggggcgcagccggcatcgctgttttgctcaatttctggtttcaggttccgcacggattaaccgtctgggctgtcaacttctcgctccttttgacggccgttaaatggcttgaacccgtgacagtcttcgggacgatgggggcgattaccatgacgtccgtttcggtgcagatcttcgaatcctgtatgccggttatgacgacgaacaatatctggctggatttattttacggctccgtccttttgggagcgggggttggactgctatataaatataatatttctaacggcggttttggcgccttggctttaatgatatcgatttaccgcggcggaaaaccgggaactgcgctgtttatcatgaatgcattcatttttcttttgaccgcgtctgtcatcgcctggggaatcgttatccaggccttaatctgccaatggatttctacgaggatcatcgatgcgatttatcagattcgcttccggccgttattgatgcctatcgccggtttccgcaacaaaaaataggccgctatttaagcgaacctaatcaaataaataaaatgtatctgatcgaagtcccagtctcagcgtttcaagcggaatggcatcttgaaacggaatattagccaaattggcgtcaggaccgattttttcaatgaaacacgtctgcagctgttttgtcggcgcttcaaaaattaaatcccctgaagcgataccggaatgaaggatctcctcaataagctgggaccgcatttctccatcgcttttgcacagcccgctcgtgccgctttccctcgtttccgtgattactttctcggctccggcttcaagatcttcgaggatataatcgatccattcggctgactccagctcgctgctgagggtgctgtctttgctgccgacttcgctgaacacgtgaaattctttcgaaaagtcggaaataaagcttgctttatctttattagagagacggaccgttccgtttgatatttcgacataacggcatccatataatttgcagtagcggtagtaatcttcaattttatcctggcttaaaaacttctcaaacaacgttcccccaaaaaagaattgaacgtcattctgcctaagactatcgattttttcctccaaatatttcgtaatcaaagacgttccccatccaaatttcacaaaatctatataatctgccgctccgtgaatcgtatctttaaaaaagctcaagggaaccccgttatcgatcaggatggtgatccctttctttcttggtttaagctgcctgtcgggcagtatcagttcagaagaaatcattgattacccctcacaatctactgtatctttcttgctttcaggtaaatgtctgttggccattattcagctgtcacgataagaattcactttccccgtttatcgtttttctcattcatgtgttgccgttcggcaaggagtgatcttcgcccacctccccattaggcagcatgttagccccttatcgcctgacttgcttatcactaggtatctatccattttgtgaagtcaaagtaagtatattcgccgtcctttcatatggttcctcacttgttctccatgacagattgcgaaatacttgcttaacatctgataatatttcggtatatcaaattgggctctattaatttaggtccacaagcagagaatatgattgatttcgatcttgcgcatctggtctttcggatattcacaaaattgctgaaataataacattttccagatcacatttagtctaaaaagtgaataatctgcctatatgttcttttagttcatgtttcgtatcagaggataagaaaacaaacctttaggacgtattgggggaaaatcgatgaacgatgttttaacgtatagcacatgggatgaaaaagcttctgaagaggtgatggatactttcagcggcgagatggacgttttgaaatgggcgtacagcacgtatcaaaaaatcgtttacgcctgcagcttcggcgcggaaggaatcgttttgatcgacttgatttcaaaggttgtgaaagaagcggacatcgtgtttttagatacaggactgcattttccggaaacatatgagctgatcaatgaagtgaaagatcgctatcccggtctgtcgatccactttttaaaacccggcctctcacttgaagagcaggaaaaacgctatggcagcgaactttggaagcgccagccggaccagtgctgccgccttcgcaaaatcgagccgctcagggagcatctgtcaggcatggaagcctggattaccgggctgaggcgggagcagtcggaaacacggaaacatgtccgatatatcaacaaggacgacaattttaaactgattaaaatctgcccccttattcactggacatgggaggatgtctggacttacattaagctgaatcagctgacgtatcacaagcttcatgatcaagattatccgagcatcggctgtgaggtgtgtacgcttcccgtgacagacagcggcaatttaagagcgggaaggtgggcccaccaggaaaaaacagaatgcgggctgcatcaattccggtaggagctgggtaaaaaatgacgattacaattttggcattcattatcgctttgttttttgccatgaacataggagcgagcggagcagcagcgtcgatgggaatagcatatggcgcaggcgccgtcaggaaaaggcaggcggccttgtggatcagcggaattggcgtatttctgggcgccatgataggcggaggagaggttgtgaaaacaatcggttcaggcatcattcccgcgtctattctcaatgtgcatattgtcgtgattatccttggatcatccgcgatttcgctgtttatcgcgaacatcgccgggattcctctttcaaccagcgaggtgacggtcggctcgattgtcggggtcggcgtcgcgtttcaggcggtatttaccgataagcttttggtgatcgtcatgtattggctgatcattccgattgccgcattttttctcgcttttttaattggacaattgctgaaaaagactgaggcgaagctgcggtggctcaaacagcaaaaatgggcgcggctgcttactgcgctggtgattttaaccgggtttttagaagctttttcggcgggaatgaacaatgtcgccaattccgttggacctctcgttggagcaggcctcttgtcagtcggcagcggaacgtttcttggagggctgttcgtggctatcggggccatttgccttggaagccgagtcattgagacgaacggaaaaaaaatcaccgagttttcgcttttgcaagggtcctgtgtttcagggctcggtgcgtccctggtcatcggcgcttcgctattcggcattcccgtgccgcaaactcagattacgacttgcagcatcatcgggatcggcctttctgaaaagggaagggcaatttttcgtaaaagcgtcattttgaagttaatgaaagtatgggttgtgtcaccggttttttcacttgtcatttcctacagtctcgtgaaaatctttctcgattttgatttatattcagtggcagttgttttatgtgtttttcttgccactttaggatctataagccttatgaaacatgccaggcagaaacaatcagatgtccgaagaaatagggatcatgtgaaatcaatcgttggagggaggggacgtaaaagagaacctgccgcatggagggacttttagttaacctggccgcctgttttggatgatatggagctaaagcgctgccgaactgcccggaatcaaatacaagtctgtcaatgcagtgcaccttttcaacagtgcatcacatcgggaaaaggcgcccgtgcagctgtatctgtttcattgccggaagtgatcgtgcagaagccgagagcggttacggcacttaacagccgtttgaccgaagaagagctcggctgacgccgctcttttttgacgattgttttggctgatccccgacgtttcagaggatcatcagtcggtccatttctcaggaaaagtattcctctggtttaaactgcatcccgattgttaacaatgaggagagagattcgggagggaaccttgatggaatatgtacacttggtagtcgaactgacgatagggtttgcagcattgtttctgatgacgaaaattctgggaaaaacccaatttgcccaaattacgccgtttgattttatttcggctttaatattgggcgagatggttggaaacgcgattttcgatgaggatgtcaccatctggaaaatccttttcgccatcctcatttgggccgttctaatctattcaatagaagttttatcgcaaaaagtgcaaaacatcagaggttttctcgaaggcaggccgagcattgtcatcaataaaggaaaaatcgattacaacgcccttaaaaagaacaaattggacctgaaccagctgcagacattggcacgtgaaaaaggctgtttttccttacacgagatccaatacgccatcttggaaacagacggttcgatcagcgtcctcccaaaacacaaatacgggatgccgacaaaagatgacttaaacattccttacaaaccggttcagctcccggtgccggtaatcctcgacggccagctcgaaaagaacaatctgcacgaagccggatttgatgagctttggctgcaaaatcaattatcaagtcagggtatcactcagtatcaagaggtgctgtatgcggaatggcgcggtgatgaggggcagctttacatcacaacatattgatgttggcaggcgcgggttcgacaagcttcgaacccgcgctttttcaattgcattcacaaggctcgaggaacatacttttttaccggtccgaaaggctgttgatctccaaaaaattccgttaaatcattcaaacggccttcaaatggccggatgacaaacgacaaaaggtgcacatgaagatgaagaatctgccttcagcctccttttcttttccttttttcttcaaaaatctccatttttcacatgctctgcgccgtccaagcaaaacacgcaaacttgacataatgatctaaagtgttaatatactaaccgtgttcgaaaaatacgaacagaaatgcgaacaaagggagatgttaaagatctttaatcaaaaaaacgtagcttttataggggcgggatcaatggcagagggaatgatctcaggcatcgttcaatccaaaaaactgcctgcttcgcaaatctatgttacaaaccacacgaaccaccggcgtttagaagaactccagcagaaatatggaatacaaggcgtcaaaaaagaacaacttgactatcagaacatcgattgcttcatcctggcgatgaagccgaaagatgcagagggcgctcttaattccatgaaaccgcatatcaaaccccatcagcttatcgtgtcagttttagctggcatatcaatatcatttattgaaaacacgctgcacgacatgcagccggtcatcagaatcatgcctaatacctcaagtgcaatcggcgcatctgcaaccgccatggccgaaggaagccatgtaacggccgatctgtcaaaaaccgcgaaacaactgcttcaatgcatgggagaagtctattccatcgaagaaagcaaaatggacattttcactggcattgccggcagcgggcctgcttacttttattatttaatggagcacatcgaaaaagcgggagccgaggctggattaagccaaaaattaacaagggaaatcggcgcgcagacattgttaggcgccgccaaaatgctgttggaaagccctgaggatacagctgttctcaaagacaacatcacttcccctaacggtacgactgccgccggtttaaaggccttggaagaaagcggcggaggcgaagcgatcgaacaggcggtcaaacaagccgcaaaacgatccaaaacgatcagtctcgaactggaacaattagtcgcagcaaagtaaatgcccgtaacgaagaaaaatactacaggagtgataaaatgacctctaatcaacagagggtagttgtcaaagtgggaagcagttctttaacaagtcttcacggcgaaatcagcagcaaaaagctcgaaaagctcgttgagcagattgtccgcctcaaagatgaaggacacgaagtcctccttgtttcatctggcgctgtagcagccggttaccggaagctcggctttatcaacaggccggatacattgcctgaaaaacaagcatccgcttctgtcggccaaggcttattaatcgaagcgtattccaagctttttttatcccacggctatatcgcttcacaaattttaatcacaaaaagcgatttttcagatgaaaaacggtacaacaatgtgagaaatacgatgaacgtgctgctgaaacgcggcattattccgatcatcaacgaaaatgatacggttaccgtcaatcggctcaaattcggagacaatgacacgctttctgctaaagtggcgggtctgatcgacgccgacctgctgaccatcctctctgatatagacggcctttatgacgcgaatccgcgaaaaacgccggacgccgcactcgtccaggaagtaactgaaatcacgccggaaatagaagcttcagcaggggatgcaggaagcgaagtcggaaccggcggcatgaagtccaaactggacgcttttaaaattacaatggcttcaggcatcaaagggtttttagggcgcgcggacacccccggcattttgcacgaagcgatctgcgggactgcgaggggaacgtattttataccgaatgcggattcacacgccctcaaccataaaaagcaatggatagcatttaactctggacctgaaggagacatcgtcgtccacaacgaaagcaaagagtttattatcgaccgtaaaaaaagcctgtatccttctagtatttacgacatcaacggccgtttcagcaacggatccgtcgttcgaatccttgatcaggaaggagaggaaatcggcctcggcgtcgtcaacttttcctcatcccagcttcgtaaatggaagaaggatacgaatcaggaaacagccgcttcctcacaggctgtcgttgacagagaagcgtttgtctgtcatttagagctatccgttccgctttaaaaaacaaatcaaaggaggaattgacatgactgcgacgagcgagagcatcagtgcacaaatcgaagaaaaagcgataaaggcaaaaacggccgcaaaatctttgcggctggcaactgaaaaagaaaagaacgaggcgcttgctgcattggccgaccacctgaaacaaaacatgagctatattctcactgaaaatgccaaagatatcgaagcgggacgaaaaaaaggctatgatgcagcctacatcgaccgcctgtcgctcaatgaagacagggttctggattttgccgatgggctgctggaagtcgcggaacttgatgatccggtcggagaaacgctatcaagctggacgctcgacaacgggttaaaagcggaaaaagtcagcgttcctctcggcgtcatcggcatgatctatgaagcgcgtccgaacgtaactgtcgatgcgaccgggcttgctctaaaatcaggcaatgcgatcgttttgaaaggcggctcttccgccattcattcgaatacagcgatcgtatcggtcatgcatcaagcgcttgattcgacaaacatcccccgcgatgccgttcaattcatcgaaagcacagaccgaagcgcaacgaagcagctctttaagatgaaagaacatatcgatgtactcatcccccggggaggcggggccctcattcaggaagtcgttgagaacgcaaccgttccggtccttgaaacgggagtcggcaactgccacatctatattgaccgggaagcggaccctgaaaaagcgatcgatgtcatgatcaatgcgaaaacagaccgccccgccgtctgcaatgcacttgaaacgctgatcgtccacgaaaaatggcttgaggaaaacagcgccgcgcttatcaatgctttaaacgaacacgggattcaagttcacggggacgaaaaggctgttcaaatgattccaggcgcaagaccagcaggggaagccgattggcagaacgaatatttaagccttgatctcgcggttaaagtcgcaggaagtcttgaagaagcctgcgatcatatcgaaacatacggaacaaagcattcagaagcgattatcaccgaaaatccggaaacagccaaagcttttctgaataccgttgatgctgcagcattgtaccacaatgcctcaaccaggttcaccgacggcggcgcactcggattcggcgctgaaatcggaatttctacacagaagcttcacgcccgcggacctatgggtctgaaagaattgaccacatgcaaatatatcatgagaggcgacggccatatcagaagataaataaagagacctgtactgaaactgcacctggtttgtcagacaccatctgacaatccggaggtgcagtttttttcggctgaatttacatcctcataaaacatgcaggcgcagaatttttttaccaggcacctttcaaactcctccctttacatcctttcaatcacattacataatgatctatgatataagagtcagaaggagagtgtgcgttatgcaaatcccatccggaaaaacctgcgttccgaccggtgtggaacttaaagacaccggctttggctatacgttgtcattgataagcggcaaatataaaatagtcattctatattggctgtctgaacgcgaagtgatgcggcataatgaattgaagcgaagcatcggcaccatttccttcaaaacgctaagcatcatgttaaaagagctggaagcagacggccttatcattcgcagagaatttccccaaatccccccaaaggttgagtattcattatctgaacgcggacgctccatcgtgcctttgttaaatatgatgtgtgagtggggggagaaaaacaggctgggctgacagcctgtttcagcccgaatgattttcagcaaaaccccttgctacatatgatcaataaaatgcaaataatctcgtgcgcttttctccaattctcctgctcccggctcattttcttcttcctcgtttccgccaggctctttttccttgccgtaaaatgcaaaaaatgaacgataatctgcgcggcaataccggaatgtcgtttcaaatggaactaatatttgttcaagcgtataccggtaccttccgttttcacgataatcttcctctttaattccggcggatacacctaatgccactttacgattgtttaatcgatctcctccatttgaaccataagcccagccgtaagctaatacatcatcaagccattttttaagaagaggcggacagttaaaccaatagatagggaattgcaaaacaagattgccgtgcgattccaccaatttttgttctttttccgcgtctatgtttccatccgggtaaacgtcggacaattcgtgaaccgtatacttttccggatattttttgagttcctctacccagcgcttatgaaccactgatgtttctaaatttgggtgtgcaacgataactagcgttttcaaagatttgccctccttcagcatgttttcatcttgagtataaagttcacactgccaatttgtaagtatgcacttttagttcaggtacttacataaaggtaagtacctgttggcgatcaaacatgcaatttacctgtccaaaatcctctggcatgaaaaatgcacttttttaatataatgttacaaagctctgctgcctaaggaatttgacgatccaaaaaggggggcactttatgaattttgaactaaccagagaacagcaaatgattcgtgaactcgcaagagattttgcgaaacaggaaattgcaccgcacgccgaacatgttgacaggacgggagaatttccgattgagacatttaaaaaaatgggggagctcggcctcttggggattccgtttcctgaaagctacggcggttcaggcggagatacgatttcctatgcacttagcgtcgaagaaatcggcaaagcgtgcggaagcaccggtcttagctatgctgcggctgtatcgctcggggctgcgccgatttattatttcggcactgaagaacaaaaacaagaatatctcgtcccgcttgcgacgggccgggcgctcggagcatttgggctgaccgaaccgaatgcaggttccgatgcgggcggcacccggacaaaagcccgctcggaaggggacagctatgtgatcagcggtgagaaatgctggatcacaaatgcaggatttgccaggaccgtcatcgtcaccgccgtcaccggaatagatgacaacggaaaaaacatcatttccgccatcatcgttccgacagattcggagggcttcaccattaaaagcgaatatgacaaaatgggtgtccgcggctccaatacatcacagctcatattggacaatgtccgcgtaccaaaacaaaatctattgggaagcccggaaaaagggtttaaacaatttctcaatacacttgacggcggcagaatttcgatcgcagcgctggctgtcggtattgcccaaggcgcatttgaggcggcgctcacatacgcgcgcgaacgaaaacaattcggccgaccgatctcttatttccaggcgattcagttcaagcttgccgacatggccatggaaattgagctcgcccgcaatatggtgctgaaggccgcctggctgaaagatcaaggacgtccgtttacaaaagaagcggcttttgccaagctttatgcctcagaaatggcgttcaggacatgcaatcagtccattcaaatacacggaggatacgggtatatgaaagagtatggagtggagcgcatgctgcgggacgcaaaattaatggaaatcggtgaaggcacttcagaaattcaacggctcgtcatcgcaaggcagctcggcatcggcaaacaagcgctgaaatgaaaacgctttctatcggaagggagggacaacgttggcagagctgctccatttgacaattggaaagttattggagaaaaccgcggcagacgcccctgatcacgaggctgtcgtctatccggaccgcggcctgcgttatacgtaccgggaatttgaccagttgtgcagaaaagtcgcaaaaggactgatggcgctcggtattgataaaggtgaacatgtcgcaatttgggcttccaatactccggaatggctcaccgcccagtttgcttcggcaaaagcgggtgctgtactagtcacagccaacacgaactatcaattatcagagcttgaatatgtgctgaaacagtcagatgccacaacactcattttaatggaatcataccggggcacttcctacattgatatcctttgcaaactgattcctgaattaaaggagggcgaaccgggcaggcttgcatctgaaagactgcctttcttaaaaaatattattttgctgggggatcaaaggcatcccggcatgtacctatgggatgatttattaaagctctcagggtcagtaagcgaaaaagcgcttgatcgcaggatggaacggctcaaagagcatgatgtcattaatatgcaatatacatcaggtacgacaggctttccgaaaggcgtgatgctcacccattccaatttggcaaacaatgcggcaaatattgcggaatgcatgaatttatcgaaaaaagacagaatgtgcatccccgttccgtttttccactgcttcggctgtgtactggggactctcgcttgcgtcaccgccggcgcgacgatggtgccggtacaagaattcagtccgaaagaagtgctttcagccgtcgaaacggaaaaatgcacggcgcttcacggtgtaccgaccatgttcatcgccgaactgaatgatccagatttcgcatcatatgacctgtcttctttaagaacgggcatcatggccggttcaaactgtccgatcgaagtcatgaaaaaagtgatcgataacatggggatgtctgaaataacgattgcatacggacagacggaagcctcaccggtcattacccagactagggtcaacgattcgctcaaaagaagggtcgaaaccgtagggcgcgctttgccgaatgtagaagtcaaaataactgaaccgggtacgaaccgggaggttgaaagaggcgttcaaggcgagctgtgcacacgcggctaccatgttatgaaaggctactacaaaaatcctgaggccacggcagcggtcatcgatgaggatggatttttgcatacgggagatttagccgtaatggatgaagaaggctactgccggattaccgggagattaaaagacatgatcatcagaggcggtgaaaacatatatccgcgggaaatagaagagtttttatacaagcatcccgacattctcgacgtccaaattgtcggagtgcctgacgaaacattcggcgaagaggtatcggcctggatcaaactgaaaagcggagcatcgatgacggctgacgaattaaaagaatactgcaaaggcaaaatcgcccgctataagattccgcgctatatcgcatttgtagaagagttcccgatgacggcatcagggaaagtgcaaaaattcaagttaagggagcaggcgcttgagcattttcaattgtaattttctctttcaagcgcgactaacataaaaggagggacctttttgtttaagaaagtactgattgccaaccggggagaaatcgccctccggatcatccgaacttgtcaacggctcggtattcagacggctgctgtctactctgaagcggatgcggagtccctgcatgtcaaagctgcggatgaagcctggctgatcggcaaaccgcgggtcagtgaaagctatttaaatattgaaaaaatcatcgaaaccgctaaaaaagcgggggtctgtgccattcatccgggatacggcctgctttccgagaacagccgttttgccgaaaggtgcctcaaggagaatattacgtttatcggtccgccgcctgacgttatcgccaaaatgggaagcaaaattgaagcaagacaagcgatggaacaagccggggttcccgtcgttcccggcgtgacaaaaagcttgtccggtctgaatgaagcccgggctcttgccgaatccatcggctatcccgtgatgctcaaggcttcttttgggggcggcggcatcggaatgcagctgatccgcaatgaaagcgaattagaaaaagcatatgaaggcaaccaaaaacgagccgccgattttttcggagacggggctatgtacatcgagaaatatatcgaacaggcaagacatatcgagattcagattttaacagacaaatacgaaaatgccgtctatctttgggagcgggactgttcgattcagagacgccagcaaaaaatcatcgaagaagcacctgctccgttattcgatgaaaccatgcgcacaaagctcggtgaagcggccgtgaaagctgcgctgtcgatcggctatgtcaacgccgggacaatcgagtttttagtagacaaggagaatcatttttattttcttgagatgaatacccgcctgcaagtcgaacacccggtgacagaggaaattacagggcttgaccttgtcgaagaacagctcaatatcgcagcgggaaaaccgctttcccataagcagaaagacattcggcgggacggacatgcgatcgaagtcagaatctgtgccgaagatccgaaaacatttttcccttcgccggggcggattaccgaccttaagctgcctgagcaaccgaatgtccgtcatgaatgcgcagcagccccgggtatgactatcaccccgtattacgacccgatgattgccaagatgatcgtcaaaggaagcagcagagaagaagccatctgcacattggccgaagcgctttcacaatatcaagtgaaaggcattaaaacgaacattccgctccttgaagacattgtaagttctgacgaattccgaaaaggcggggtccaaaccgattttatcagtcgctatcagtcaaaatgaaatcaaggaggcgtactatgaatactgttgtcaccaatatggcaggaaacgtgtggaaaatattagtgaaagcgggggacaaaatcgaaaaggggcaggaagtcgccattttagaatcgatgaagatggagattccgattgtcgccgaaacggccggaacagtcaaaaccgtcagaaagaacgaaggtgattttgccgatgaaggggatgtcttattggagcttcaataaggtctggaggatggcaaatggacgtaccgaagaacattttcattaaagaagtcgggccgcgcgacggtctgcaaaatgaacaaaccgcactttcgacagctgataaaattacctggatcgacatgctttctgccacagggctttcgtatatcgaaatcacttcattcgtccatcctaagtggattcctgcactgtctgatgcccttgatgtcgccaaagggatcaaccggaagccgggcgtcacctacgcagccctgattccgaaccgaaaagggctggaacgggctctcgaaggagggatcgatgaagcttctgttttcatgtcggcaagcgagacacacaaccggaaaaatattaacaaatcgatcggggaaacgcttcccgtcctgaaggaagtcatcggagcggcaaaacaagcgggcctcaccgccagagcatacctgtccacagtatttggctgtccttatgaacatcacgtgccattggaacaaattatacggacatctgaaacgctgttcgacatggggatcaacgaactttccctcggagatacgatcggcgcagcaaatcccgtacaggttcaaagggtgcttgaagtcctcttaaagcgctttccaaaagagaatatcgcccttcattttcatgatacgagagggatggcgctcgccaacatgatcgcagcgatggacatgggaatcaccgtatttgactcatcatgcggcgggctgggcggctgtccttacgcaccgggagccacggggaatgcggcaactgatgatttgatctacatgtgcgcccagatgggcatcgaaaccggagttgatctcagcaagctgctttcagctgctaaatggatcgaagacaaaaccggaagagagctgccaagccgaaatttgcaggcggctaaatcaaagaactgttttcattgatgaagaggaggaagaccgaatggagcccaatgttctttattccataaacgagcagtcggtcgccgtgttgacgctgaacaggccgcaggctgcaaatgccctctcgcttgggcttctcgacgactttcagcgcatccttcgagatattcgttcaaacccggccgtccgctgtgtcatcataacgggaaaaggggacaggacgttttgtgcaggcgccgatttaaaggaaagagcccgcatgagccaaacagaagcgaagcaggctgtttccctgattcaacgcgtggtcagcgaaacggaaaaactgccgcagcccgtcatcgcttcattaaacggaagcgctttaggaggggggctggagcttgcattggcgtgcgacatcaggatcgcagccgaacatattgaactcggcctccccgaaacaacgctcgcaatcattccaggggcaggagggacacagcggctgccccgcttgatcggcaggggaaaggcgaaagaaatgatctttaccggctgccgcatcagcgccgaagaagcgcaaaagatcagcctggttgaacatgtcgttccgctttcgaagttaaaggaagcgagtgaaagcatcgcggcgaacatcgcggcgaacggaccggtagccgtcagacaagcgaagtttgccatcaatcaaggccttgagacagctatcgaaacagggcttgccattgaacaaaaagcctatgaactgacgattccgacgaaagacaggacagaagggctgaaagcttttgcagaaaagcggaagccggattatacgggagaataaaacgaacggagggacagccgatgccggccgaaaaggaattgtatgaacgcatccgccggattcaggagggcggcgcggagaaataccatgaagctaataagaaaaaagggaaattatttgtcagagaccgattaaagctgctgcttgacgaaggactcgacctagaggacgcgttttttgccaattgcatggctgacgggctaccggcagatggagtcgtcactggaatcggaaaaatcggcgggcgaaccgtttgcgtcatggccaatgattcaactgtcaaagcaggatcatggggagcgagaaccgttgaaaaaatcatccgcatccaggaaacagccgaaaaactgaattgcccgcttctttatttggtcgattcggcaggcgcaaggattacggatcaagttgacatgtttccggggcgaagaggagcggggcggattttttatcagcaagtcaaattatccgggcgcatcccgcaaatctgtctcttgttcgggccttcagcggcaggaggcgcctacataccggctttttgcgacatcgtcattatggtcgaaggtaacgcctcgatgtatttaggctcgccgcgcatggcggaaatggtgatcggcgaaaaagtatcgcttgaagaaatgggcggcgcgagaatgcactgttctgtttcaggctgcggagacattcttgccgacacggaagaagatgcgatcaagtcggcgcgccggtatctttcctactttccgtcgaactacaccgaaaaagcgcctgtcattgaagcaaaatccgcccgtccgtttgaccggtcattggaggacatcattccgaaaaaccaaaacgctccgtttcagatgatggatttaatcgatcggatcattgatgaagcgtctttttatgagatcaaaaaattgttcgcgccagagctgattaccggtttggcaaggattcacgggcagcctgtcggcatcattgccaatcagccgcgggtcaaaggcggtgttttgttccacgattcggcagacaaggccgcaaagtttatcaatttgtgtgatgcctatcatatcccgctgctgtttctggctgacatccccggttttatgatcggaacgaaagtcgagagggcgggtatcatcagacacggtgcgaaaatgatttcagcgatggccgaagcaaccgtaccgaaaatatccgtcatcgtcaggaaagcttatggtgcaggcttgtatgcgatggccggtccggcctttgaacctgactgctgtctggcgctgccgacggcgcaaattgccgtcatgggcccggaagcagcggtaaatgccgtttacgctaaaaaaatcgcagaattgcctgaagaagaacggtccgcattcatcgccgaaaaacggaaagagtaccaaaaagacatagacatttaccggcttgcttcagaaatgattgtcgacgggatcattccggccgactcgctgcgaacggaactcatcaaacggctgaatgcatatatgaccaaatacatgacatttacggaacggaagcatcctgtttatcccgtctaaaggccaatgaaacgaaaaggaggaaacggcatgggcgaaaaagcggtttggcagcctgatccggaatttgtaaaaacaacccggctgtttcaatggatgacagccctcggtttttccgactatgatgattttttgaaagcaagtacaaacgatatcgcctggttctgggaagaggccgaaaaagcgctcgggatcagctggtacaagcggtacagccaaacattgaatctcgacaaaggcataaaatggccgcaatggtttaccggcggccgcttaaatgccgtttacaacgccgtggaaaaatgggcccgccggcctgatacggccggcaggacggcactcatctgggaaagtgaagacggaaaaacagaacagatcacctattcttctttacaccaacaagtcgcccgtgcggcggcaggctttaaaaagcaaggcatctcaaaaggggatgtcattgcgatttacatgccgatgatccccgaaacggtcatcgccatgctggccgccgctaaaatcggagcggtattctcaccggttttttcaggctacggcgcccatgcagcagcggcgagacttaccgctgccggagcgaaaatccttgtcacagcagatgcctttttgcgaaggggaaagaaggtctgcatgaagaaagaagctgacaaagccgcggaccgttcccccactgttcaaaaagtcgtcgtctgcaagcttcacggcggcgatcaagattggaattataagagagatatcgactggaatgaattgatgaaaaacgagcccatgcaaaacaccgaagaaatggacagttcagatccgctcatgctgctatacacatcagggacgacaggacagtcgaagggagcggttcatacccatgccggttttccgctgaaagctgcatttgatgcgggattcgggatggatgtcaaacaaggggacacatttttctggtttacagacatgggctggatgatggggccgtttttaatattcgggggcctcataaacggagcggctgttttgctgtttgacggagcaccggactacccggccccggatcggctgtgggagcttgtcagcagacaccgggtgacgcatctcggcgtctctccgacgctcattcgctcgctgatgcagcacggcgaagattttctctatcaatacaatctgaacagtctgaaggcaatcggctcaacgggcgaaccatggaattatgagccgtggatgtggctgttccgccatgttggaaaagaacggattcctatatttaattattcaggaggaacagagatctcaggcggaattttaggcaatgtgctcctgcggccgatcacgccgatgacgtttaattcgcctcttcccggcatggcggccaatgtcttcaatgaaaaaggagaggaagtcgtcaatgaagtcggagagcttgtcctgacaaagccctgggtcggcatgacgaacggtttttggaaggagccgtcaagatacgaagaagcatattggagccgctggaccgacgtctgggtgcacggcgattgggcaaaacgggatgaaaacggctactggacgatcagcggacgctctgatgatgtgatcaatgctgccgggaaaaggatcggccccgccgaaatagagtccgttctggtcggccatccagcggtggcggaagcaggcgtcatcggcgttccggataagctcaaaggccaggctgccgtctgcttcgtcgtcctcagacagtcggaaaagccgtcggaagaattaaaagatgatttgctgaaccttgcatctgatgcgatcggtaaagcggtcaagcccaaagcggtttattttgtcagcggtttgccgaagacgagaaatgcaaaagtgatgagacggctgatcagagctgcctatatgaacgagcccgcaggcgatttgtcaactttggaaaaccgcgaaacatatgatgaaattgccggtctttcagtgcgaaaaaatctgtagtatactggataaggcttacaaacaaagaagaaggacacgtccttcctctttttattttgatgaagctcgatcgaccaacactcacatcctgacgataaccgaaccgccgccggccgtgcagacgcgattctgctgctcttcaatcgaacgcagcagctgattgttgctttccatgagcttgatgagcaattccatttgatcttcgagatttttcagcctttggttcatctgctgcgaagattgaccggtatgcatttgcggggctgaaggcggataagacgtttcagaattccattttgaatacatagaataggcctccatcatctaaactgatataccttatcgtatgatcctacaatcgcaatgttcgcctaaatcaaaacgagaggaaacaaaacatgtacttgacgataaaggaaaccgcagaatatttaacgctttcagaagcatatgttgaacagcttgtcagagaaaagaaaatccgcaccgtctttgacggacagcagcatttaatcaacaaagagcaattcaatacgcacatggaacagatggaaaagtataaagagtgggcggaatccgttctgaacgagcccatccccgaagatccggacgtcaaagatgaagattaacccgggataacaataactttattatgtaaactgacagatacgattctatgaaagtttcgcacgttttccgtctctattatcccgtgtgaatggggcgtttcgtaaaaaaagacacaatataggaaatgaaagggatgaaagaagccctatatataaagttttctatgattttatttcatttccgaaacaatcacgttcattttttgttcaaaaagtgttatcatttagtagtaaaaaatacagcgtgttttgagattgcgggttttcgggagttccagaccgaaaacagcaaaacaaacacaaaaggggagagcctttttgcggacttgtttgtgcataaattcacaaactataaaaaggggcttccttcaaaaaacagcacatcgcttattgaaaaggagaattggttatgccggaaacaatcgatcaaacagctgatcaaacaaacgaatctgtaagccaaagccaacgcgatcttatcgatcaactgctaaaacctgaagtacaggagtctttgactgttttagtcgaccagcttccaaagctgacagaactggtcaacattttgacaaagtcttacgacttcgcacaatccgttgcaactgatgaagtattaaaaaatgatacggtcggtgccattacagaaattcttgagcctgtcaaagatacggcaaaagaaatcgcggctaccgccattgaagcaaaagaccgcgctgacgaaagcaatgaagtcatcggacttttcggtttgctgaaaatgcttaaagatccgcaggcccaaaagctgttccgatttgttcaaagctacctgcaaatcatgtcagaacgcgaaaaacaaaaataatcactatacattcagaataaggacggaggattcacgatgtcaaaacatatcgtcattttaggcgctggttacggcggattactgtctgctctaacagttcgcaaacactacacaaaagaagaagcaaaagtcacagtggttaaccaatatccgacacatcaaatcatcacggaattgcaccgccttgctgcgggcaacgtgtcagaacaggcagttgcgatgccgcttgcaaagcttttcaaaggaaaagacatcgatcttaaaatcgccaaagtcaactctttctcagttgacaaaaaagaagtcgctctttctgacggctctaccctgacatatgacgcacttgtcgtcggtcttggttctgtcactgcttacttcggcattccgggacttgaagaaaacagcatggtgctcaaatctgcaaacgatgcaaacaaaatcttcaagcatgttgaagagcgcgtgcgcgaatacgcgaaaacgaaaaacgaagctgatgctacgatcttaatcggcggcggcggactaacaggcgtcgagcttgtcggtgaactcgccgatatcatgccgagccttgcgagaagctacggtgtcgatccgacagaaatcaagctgaagcttgttgaagccggtccgaaaatcctgccggttcttccggatgagctgatcgaacgtgcgacaaagagccttgaaaaacgcggcgttgaattcttgacaggactgcctgtcacaaatgtagaaggaaacgttgttgatttgaaagacggacaaaaaattgttacaaatacatttgtctggaccggcggtgttcaaggcaatccgctgatcggcgaatcaggtcttgaagtcaaccgcggacgcgcaactgtaaacgacttccttcaatctacatcacatgaagacgtgtttgttgcaggggacagcgccgttgtcttcggtccggatggccgtccgtaccctccgacagctcaaatcgcatggcaaatgggcgagctgatcggctacaacctgtatgcatacttagaaaacaaatcaatggcgacgttcagccctgtcaactcaggtacgcttgcaagcctgggccgcaaagacgcagttgccgttatcggcgcgaacagcacatctcttaaaggcctgcctgcttcattgatgaaagaagcgagcaacgtccgctacctgagccacataaaaggtctgttcagcctggcttattaatggaaatgaagcgctacttatagtttaaactataagtggtgcttttttttgctttaaatttgacgggcaaatgaaaatattgtggtaaatttgaaccaaaatatactgacaagaacggaatcgcagctcgctttttacggactggcgccttttctgctcatcatcgtgactgcagcaggcgttcctttgtcagcggaattgacggaattcaatatcaccccataccgtcatttgatcatgagccttgccatgcttttcatccccctgattctcggtgtcatgtcggggtttatcctgcttgatgagcgcgacgaaaatatgattcagtattttgccgtgacgcccttgtcgaagcgcggatatgtcatgatccggctcatcctgccgatggcgatgacattatgctacagcattttgctgtttgcctccggcggtctaatggcgcctggcgctgtgaacctattgttcgtcctgatcatggtcacgcttgaagccccgatttacacgctgcttttagccgcctatgtcgcaaacaaagtggaaggactcgctttaatgaaaggattcagcctgctcactctcatgccggccgcggtttattttattcctgtgccgtggcagcttttcggtgttttcaccttattggacagcgaaaacgtacttggcgggaatatcccacgaagggctttttctcgttttcgggatcaccggaattgcgctgcacattatgatactgctgtttttataccggaggtttttggtgaaaaccgaccaataggagtatatcccgccccgttttgcaataaagtattaaaacataagcgggaggcgggatatccgatgaagaaacatatgaagctttgtctgtgtatgatgatgatctttgtattgactttggccggcagcatggacggcttgggcgctgaggaaaaaggcgggctcaaagagcaaatcgatcagctgttaaagaccgaacctgatttaaaaggagcgctcgcaggcatcagcgtcaggtctgcggaaagcgggaaaatgatatacggacatatgggcgatacacggatgagacctgcgtccaatctgaagcttttaacggcagcagctgcctattccgtcctgggcgaggactatacctttcccacagaggtaatggctgatggggcgcgagccgcgggcacactcaaaggcagcctttatataaaaggaaaaggcgatccgacgcttttgacagcggactttcagcaaatggccaaagcactccgaaaacaagggatcacagttatccggggagacttggtcggcgatgattcctggtacgatgaaatccgctattctcaagacctttcctggaccgatgaagacgcatactatggagcgcagatttcagctttaactgtttcgccaaatgaagactatgatgccggaacggtcataatcgacgtgaaccctgccggaaaaaccggaaaaaaacctgctgtattgctcaccccgcaaacaaaccatgtcaaaatcaaaaacgatgccaagactgttgctgccgacggaaaaaaagatatcacgattaaaaggaaacacggaggaaataccatccaaatcaaagggacgattccacaaggcgcttcaagggtcagacaatgggttgcggtttgggagccgtcagaatatgcactcgatttatttaaacaggctttacatcaacaaggcattcgaatcctgggaaagactaaaatcggcaaagcgccaaaaacagcgcaccgcatcaccacacatcaatccatgccgctgtcagagctgatgattccctttatgaagctcagcaacaacggccatggcgaaacgctgatcaaggaaatgggaagggccgcgagacgtgaaggaagctgggatcaagggctagaggtgttaaatacggaactgcagagatttggactggacacggaaaaaatcgttctcagagacggctcaggcatctcgcatatcaatttgatttctgcacatcagatcacaaagctattgtattccgttcaagacgagaaatggtttccgtcgtttgcccgttcactcccagttgcaggtgaaagcgacagaatggtcggcggcacattaagaaaccggctgaaagacccggctctaaaaggaaaagtcagggcgaaaactggctctctttcaaccgtcagttccttgtcgggctatgtcgatactgcaagcggaaagacattgattttctccattctcctcaatcagctcgtggatgatgagaaaggaaaggatattgaagacaaaatcgttcaaatattagcttcttcatgacttctcccattgcagcaggcaatgggttttctttaattcatgttttgctgccggcggatttaaaggctcttgagctctccgagcggaaatgcttcctcgctcagatcagtgaaaaaacgtcatgcaatagcggtctcgtcaaaagactgctatgtttgccaccagctcccaaagcaccatcgaatcattcggcaatcagactgtatcgataggctgatgatcaatatttctctgtgcaagccggccattttgccggcttttttatataacagttttcgttacctttgactttattataatacagatttaaataataaaaattgcttcaaacaacagtctatattgaaaaaaacgcgatgttcaaagaactttctcaaatttgttaactatttcacaaaatatgtgatgtttatcacattcaaacctgttatattcaacataagatataaatgcaacaactgttatatcatttcaacttgaaaaagagggggatttaaatggaacaatggaaaggtttcaccacaaacgtttggcaaaaagaagtcaatgtccgcgattttattctctcgaactttgagccatatcaaggtgacgaatcgtttctcgaacctccgacggaagctacatcggcattatgggatcatgtaatggatttgacaaaaaaagagcgtgaaaacggaggcgtccttgatatggatacagagatcgtctcaacgatcacctcgcacggtcccggatatttgaacaaagacctggaaaaagtcgtcggcgttcaaaccgatgagccgtttaaacggtcgcttcagcctttcggcggcatccgaatggcaaagcaggcatgcgaatcctatggttttaaactgaatgaagaagtggaaaggatctttaccgattaccgcaaaactcataaccaaggcgtgtttgacgcatatacggacgaaatgaagctcgcccgaaaagtcggaatcattaccggactgcctgatgcttacgggcgcgggcgcatcatcggtgattaccggagagtggcgctttacggcgtggatttcttgatcgatgaaaagaaaaaagatgcggccggcacctctcgggtgatgtctgaagaaaacatccgccttcgtgaagaactgtcagaacaaatccgagcattgaacgaacttaaagcgcttgcaaaaagctatgggtttgacatttccaagcctgcggcgaatgcaagagaagcatttcaatggctgtattttgcctatttggctgccattaaagagcaaaacggagcagcaatgagccttggccgcgtgtccacgttccttgatatttacatcgaaagagatttgaaaacgggcgtattaacagagcgtgaagcccaagagcttgtcgaccatttcgtcatgaagctgcgtttggtcaaattcgcgcgcacacctgactacaatgaactgttcagcggcgatccgacgtgggtgacagaatcaatcggcggaatggcgcacgacggacgcgccctggtgacgaaaaactcgttccgtttcctgcatacgcttgacaatttaggcccggcgcctgaaccgaatttaaccgttctttggtctgtcagactgccgcaaaagtttaaaaactactgtgccaaaatgtcgattaaaacaagctcgatccaatacgaaaatgacgatatcatgcgtccagaatacggtgatgactacggaatcgcctgctgtgtatcggcaatggcaatcggcaaacaaatgcagttcttcggagcacgcgccaacttggcgaaagctcttttatatgcgattaacggcggaaaagacgaaaagcataaaatgcaagtcggtccggaaatgccgccggttgcttccgacgtgctggactatgacgaagtgatgcataaattcgatcagacgatggaatggctcgcaggcttgtacatcaacacgctcaatgtcattcactacatgcatgataaatattgctatgaaagaattgaaatggccctgcacgacacggaaattttgcggacgatggccactgggatcgccggcttgagtgttgtcgccgattcattaagcgctgtcaaatatgccaaagtcagcgtggtccgcgatgaaaacggcattgcggtcgattttgaaacagaaggcgactttcctaagtacggaaataacgatgaccgcgtcgacgcgatcgccgttgacattgtcaagcgctttatgaaaaaactgcgcaagcatcagacatatcgccagtccgttcagaccatgtcaattttaacgatcacgtcaaacgtcgtttacggcaagaaaaccggaaatacgccggatggacgccgcgcgggagaaccgtttgctccaggtgcgaatccgatgcacggccgcgatactaaagggacgcttgcatcgctgtcttcagtggcaaagctgccttacagctatgcgctcgacggcatttccaacaccttttcaatcgtcccgaaagcgcttggcaaagacgaagagagccgcgccgccaatttgtcaagcatccttgacggatatgccgcaaaaacaggacatcacttaaatgtaaacgtatttaacagagagacactgctcgacgccatggaacatccagaggaatatccgcagttaacgattcgcgtctcaggctatgcggtcaactttattaagctgacgaaagaacagcagttagacgtcatcagcagaaccttccatgaatcgatgtagcgagcaataagcggagcgcgaccaaggcgctccgcctcataaaaagaggtgatctccatggatggaaatattcattcgatcgaaacattcggcaccgttgacggtccaggcatcaggtatgtcgtcttcacacaaggctgcctgatgcgctgtcaattttgccataatgctgatacttgggaaatcggaaccggaaaacaaatgacggtttccgaaatcgttcaggatgtccagcattatctcccgtttattcaatcatcgggcggaggcatcaccgtgagcggaggcgagccgcttttacaactgccgtttttaatcgagctgttcaaagcatgcaaaagcctcggcattcacacggcactcgattcgtccggcggatgctattcggctgcgccggcatttcaagagcagatcaaagaactgatccagtatacagaccttgttttgcttgacctcaagcatcacaacagaaaaaaacatatcaacctgacaggaatgccgaatgaccacattttagaatttgcccggtttctcgctgaacatcaagttcccgtctggatccgccacgtactggttccggggatctccgatatcgatgccgatttaacggccctcggcacgtttatcggcacgcttgcgaacgttcagaaggtggaggttcttccttatcacaagctcggcgtctacaaatgggaagcgcttggcctggattatccgttaaaaggggttgaaccgccaagtgccgacagggccgaaaatgcgtacagactgctcaccgcacacttgcaaggcggatccttgctgcaagagacataaacgcttttgccggacagactttttctaacaagaagctgtcctttttgtcttacctcacaactgtataaaaaatccgtttctttacaatagtaagatgagaaagatgcgcctgctgcggcaggccgacaataaaacagcaaggtgggcgggaagcatgtatcatttgtatactcacaacgacttggacggagtcggctgcggaattctcgcaaaagtggcttttggcgaacgggtcgaggtccgctacaattcggtcaccggactcgacatgcaagtcgggcgttttttggagcggacaaaaggcaaagaaaaacagcatgaaggcctgtttatcacggacttgtccgttcatcaagaaaatgaggaaaggctggaccaatatgcggaagcggggggaaaggtcaaactgatcgaccaccataaaactgcgcttcatttgaatgaacgcccttggggcatgataaaagttcaatatgaggatggcaggctcgcttcagcgacttctcttttctatgaatacttaatagacaacggccacattcgagagacaaaagcgatggatcagttcgtcgaactcgtacgcctctatgatacatgggaatgggaacagacgggcgctctcgaagcgaaacgcctgaatgacctgttttttatggtatccatcgacgaatttgaggaaaaaatgatccggcgccttaaagaaagcgacgcgttttcatttgatgaattcgaagaaaaaatcttggatatggaagaagaaaaaattgaacggtatatccgcaggaaacggcgggaaatcgttcaaaccttcattaatgcgcactgcgtcggcatcgtgcatgccgaatcctatcattcagaggtggggaacgaactcgggaaaacgtatccgcacctagactatatcgccatcttaaatatgggcggcaaaaaagtgagccttcgcaccatccatgatgaaacagatgtatcagaaatcgccggcacgttcggcggaggcggccatgccaaggcagcggggtgcccgctgacagatgaagcgttcaagctgtatgtaactgaaccgtttccgctggagcccttgagagcagatgcctttaaaaacgtctataatgtaaaaaagtccgactacggcagcctttatgtcaacagggacgaggaccagttttttctctttcctagcgcaaatggctggaacattcaattaaacggcgtggctcagcatgagacattcacttcattcgaagaggcagagcggttcattaaaagaaattacgctgcatggctcgcgagggatgaagcatttgtccaatatttgatgcagcaggtgaaactggcgattcaaacgacaggctaaagacagcgacatgtcttggcctgttttttcatatacaaaaaagaacatccggcatataataacagaaagttctgatttttccaaaaggggagatgttcatgaaagaaaagagcgcaggctgcgaaactaaagaattccgggcagtgtggatcgccaccgtcacaaatattgactggccttcaaaaaaaggactgacaatcgaagagcaaaaaacggagtatgtgaagcttttggatgatgtgacagcaatggggatgaacgcggtcgtcgttcaaattaagccggcggcggatgctttttatccttccgcatacgggccgtggtcggaatacttaacagggattcaaggaaaagaccctggatacgatccgctggcatttttgctcgaagaaacccaccggagaaagcttgaatttcatgcatggttcaacccttatcggatcacgatgaatcataccgatttgaacaggctgtcacaggatcacccggccagaacgcaccccgactgggtcgttgcctacggcagacagctgtattacaatcccggcatccctgaggcccaggaattcattgtccaaggcatagcggaagtcgtcaagaattacccggtcgacgccgttcatatggatgactatttttatccgtataaaattgcgggagtcgaatttcccgacttgagcacatatgaacaatatggaaaagaccgtttttcaaatattgaagattggcgaagggacaacgtcaaccagcttgtcaaacaaatcaatgatgccgtcaaaaaagagagggcctcagtcaaatttggaatcagcccctttggtgtatggcgaaatatagcagatgatccgacgggatcgaatacagccgccggaatgacaaactatgacgacctttacgctgacacgagggaatggatcagacagggatacatcgattacatcgccccgcaaatctactggagcatcggctttgccccagcttcctacgacattttagtggactggtggaaaaatgaagtcagccatcgccccgttcatttatacatcggacaagcagcctataaaatcaatcaaaactcagatcccgcctggtcagaccctgaagaatatccgcggcagatcgcattaaaccgcgcctcaaatgtgatgggaagcatccatttcagcctgaaagatttaaaccggaatccgctcggcattaaagacagactgatccaggacttgtacaaaaaaccggcagctgttcccgatatgccttggcttggcagcgtaaacagtgaaaactgatattttgcggtaacagtaccaatccattttgaacgttgttcaaaatggattttttgtgttaaaaatcgcatcgatagtgcaccttaatagataaaaacaaggaaagaaaggtttaaatcaaatggacattttcttagcgattttaccagcgattttctggggaagcatcgtgctctttaatgtaaagcttgggggcggaccgtacagccaggtgctcggcacaacattcggcgctttaattttttcaatcggaatctacttcgtcgtccagcctgaattatccccccggatatttgccgtcggcgtcgtttccggactattttgggcgctcggccagaccaatcagctgaaaagcatcgatctgatcggcgtgtctaaaacgatgccgatctcaacagggcttcagctcgtatccacttctctgtttggggtgcttgttttccatgagtgggcgacgacaatctcgatcgttctcggcgttctggcgctgatttttatcatcgtgggaatcgtgctgacatcgctggaagaccgcagccaaaaaacagaggaaaaaaccggcgacatgaaaaaaggaatcgtgattttgctgatttcaacattcggctatctcgtgtatgtcgtcgtcgtccggctttttgatgtcagcggctgggcggctctttttcctcaggctgtcggcatggttgccggcggtttgatcttgacattcaggcataagccgtttaatttttacgtcatcaaaaatatcattcctggtttaatctgggcagcgggaaacatgtttttattcatctcccagccgcgggtcggcgtagcgaccagtttttcgctatcacagatggggatcgtcatctcaacgctcggcggcattattctgctcggcgaaaagaaaacaaagcggcagctgatcggtatcgccatcggcatcatactgatcgtcgcagccggcgttttgctgggcatcgcaaaagcttaaggacggcttctaaagccgtcatcagattgttgacaaaatcccaaaacgacttttagttttgggattttgtcatcctttcagcgtgattgaaaacccttgcagtctaggaaggccgagcattggagcggagcgaatgttggaattcgtgagcaccgacgcgcaggcctgacaacgaatgcgagggtttgtcgacacgctgaggacggcttctaaagccgtcctttaatatgtgatgctgcccttaagcggcagatggtcggaagcgttcggatcaacggcgacaatttcagccgctgacacatgaaaagacggactgagaaagatgtagtccaaccgccgtctcgggcggtgggaagggtgggtgaacccctgtccgtattgactttcatcccacaggtcggccagtttttccgcgacctttttccatccccgtgaataaggtttcatattaaagtctcccgtgacgatcacaggcagatcgctctcttgaaccttctcgattaaaaaatccgtctgcttgccgtgaagccacggattcaggctcaaatgcgtaacaaaaacgcgaaagagccggtcaccgatccggacatcagcctcaagaagagaccttccttcgatcagccctttgacaaaattgaatgaatgatgccgttctttcttaatcggaaaacgcgttaatagagcgttcccgtattgccttttctcagaagaatcgccggaactcaatgaaagggaggggcagtacgcatagtgcatgttcaattgttctgcaagccggccgatttggtcttcgtaatcgcttctatttgagaaatgccgatccacttcattcaggccgatgatgtcgcagccgctttgagcgatcacaccggctgttctacctaaatcaacgcggcggtcccttccttttccatgatggatattaaacgtcatgatgctaaatttcataatcatcccgcctcttcttttgctaagcatattgtatctccgtaacgcttaaaatatttcagctgtcggcagagcaagtttaggttaaaatgacattatgaaataaagaggggtggtccttatgacaaatagcagaacgaatccaaaggttgatgaatttttaagcaaagccgaaaagtggaaggaagaatttaagaagctccgtcaaatcgtacttgaatgtgagctgaacgaagatttcaagtggaagcatccttgttatacgttcgagaataaaaacatcgttttaatccatggatttaaggaatattgtgcgcttttgtttcataaaggcgcattgttaaaggaccccaacgggattcttatccagcaaacggagaatgtacaagccgcgcggcaggttcgattcaccaatgtacaagaaatagctgaaatggagaccattttgaaagcttatataaatgaggccattgatgtagaaaaagccggcctgcaagtggattttaaacaggctgcagaatatacaattccagaagaacttcaaaaaaaattcgctgaaatcccagctttaaaagcggcttttgaagcattgacgccgggccggcaaagagcatatattctttatttttccaaaccaaaacaatccaaaaccagagagtcgcggattgaaaaatatactcagcaaattctcgatggaaagggattgaatgactagtatattacgcaactacctttcatgggagatgcgaatcataatcatgccgaagaagcggcgaaatgatgagtgagaataaaaaagcttccgagtcctcggaggctttactgttctagtatgatgataatttggaggaacctattgcaaaacgtacatacgtatatttcattgtctttggtcattatcatttgggaatccttcatgtctggctttttcattgggaactgcttgctacagaaaccggatttttcatttggggctgttcgatcctcatgggcctcatcctttatttgtccggccgcaaaaacgcagtgacacgccgatttttgcctcaactctagtgtcaatcattttagcgtgtttcacagtgacaatcgatgttgtcacgagttccgcgccttgatgatcaccgcttgattatataaaaggacatttatataatggatgcaacataacgtctgcaaaacgcctgatattggaggaatgtcatgtccgtacaaacaaagcttgattcgaaaagcacggtgagctgcatgaagatattgagcgattctacccgactcttaattctgaaactgcttcaggagaaaccatattgcgtctgccagcttgtcgatatgtttgaaacaagccagcccgcaatcagccagcatttgcgaaagctgaaaagcgcaaatatgatcaaggaacagagaagggaacaatggcgtttttattcgcttcatgacgactttccggaacgcgaattggtccttgccgttctcaatcagatcgatgcacacgacgaggttcttcaaaccgttaaaagaaaagaaagacccgtttcgtgcagttaaaacagaagagggtggactgttccctctttttcatttgcattccgaatataagcattgacttatataacaattttattataagatgtgtccggagaggaaacctatgaaggaggcgtacacgcgatgacgacagtcttagccactttgatttttctgctgacgctcacgctcgtgatttggcagccgaaaaatctatccatcggctggtcggcctgcggaggagcggtgctggctttaattgccggagtcgtcaattttcaggatgtattagacgtaacgggaatcgtatggaatgcgactttggcatttgttgcgatcatcattatctccctgatccttgatgaaatcggatttttcgagtgggccgccctgcacatggccaaggcagctaaaggaaacggcattcggatgtttgtctatgtcaccctgctgggagccgtagtagccgcgctgtttgccaatgacggagctgctttaattttgacgccgattgtgcttgccatggtacgcgcgttaaattttcaagaaaagctcgtttttccttttattatcgcaagcggatttatcgcggatacaacatcgctgccgcttgttgtcagcaaccttgtcaatattgtctcagcagactttttcaacatcggatttatcgaatatgcaacaagaatgattgttccaaacctgttttcgcttattgcaagcatcatcgtgctttttttgtttttcagaaaaagcattccgcggcattatgacatgacaaatgtaaaacagccagcggaagcgattagagacaggaaaatattccgcttgtcatggctcatattagccgttctgttggccggttactttatcagcgagctgttctcgatccctgtctcgatcatcgcgggcgtgatcgccgtcattttcttaattacagcgaaaaacagccccgcggtgcaaacgaagaaagtgctgaagggagcgccttgggcgatcgttttcttctcaatcgggatgtatgtcgtggtatacggtttgagaaacgccggcttaacagatgttctctcacaggtcatccagaccgtcagcgatcaagggctgtttgccggaacaatgggaatgggctttatcgcagccatcctgtcttcattaatgaacaatatgccgacggtgatgattgatgcgcttgcgattcagaataccgatacacacgggattctcagagaagcgctgatttacgccaatgtcatcggctctgatctcggtccgaaaatcacgccgatcggctccctggcgacgctcttgtggcttcacgtcctttcactgaaaggcgtaaagatttcttggggaacctattttaaaacaggtgtcattttgaccattccaaccctgttcatcacgcttgccggactttatgtgtggctgctgatcatccattaaacatgataggagacgatgaccaatgtcaaaaaagaccatctattttttatgcacaggcaactcctgccgcagccaaatggctgaaggctgggcgaagaaacatctcggagacgagtggaacgtctacagtgcagggattgaagcgcacggtttaaacccgaacgcagtcaaagccatgcgagaagcaggcatcgatatttctgagcagacgtccgatatcattgatcccgatatcttacacaacgcagacctcgtcattacgctgtgcggggacgcggctgataaatgcccgatgacaccgccgcacgtcaagcgcgagcattggggttttgacgatcccgccaaagcagaagggacagaagaagaaaaatgggcattctttcagcgtgtacgcgatgaaattggagagcggatcaagcgatttgcggagacaggagaataaatgcaaagctcaggtaacaatacctgagctttgcatttattagaaacatataaaaacacgtctgcaacatatattttctataaagaaagaacgtaccctaaggcatgcggccgttcatgtaaaaattcagaaatcaatgtaccgaggaattctgtaaaatccattgccatcagcttttaaaagaaaagatgacctgaaaaactcgtcttaaatgttacttgttttcttcacctaaaactgctggagaagcgcatgacattcttacgtttaattcagggtccattttttgagttaatggtattgagcccggctcgcgaataagagacagcagagaatcgaccattttgtgagccaattgatcgattggaacccctacgctcgtcagcggggtttcaaggcttgccatttgagggatattatcataagaaattaaagataggtcttcgggtatactgagctgttgttcctttacggctcgtaaaatccctacactgatatcgtagcttccgctaatgattgctgtaggttttggggtttgttgtaatagttttttcgcagcggtataaccgttataccagcttaacccattagtatttaaaatactgtttcgacttaatttcaaaccggcttccatcataacctcttcaaaccctttgcttttttcaacctgacgcttgtcggcaggggagaggtcgccgacgtagctaatgtttttgtggccaagttgatacagatacgcaacggctttgtaaattgcttttttatgattgacatcgataataggatgtgtatgttcacctgacactccgtaagataagataggaatagttaatccagtatcatcactaagctgagtttcgccgccttcttcaaaaatcataattccatccacgcgaaaactcttaaacaaatccactgcctctttagctctgttaacagataaaatcattgaatagttgttcttttcgaccacttcatttattttagtaacaagtgctgataaagcgattctttcaatggtaggccagacaagaccgatcgtttgactttttttagatgccaagcttctcgctgcaaaattcggactataccctaattgttcggcaacttgcaagacctttttctttgtatccggttttacaagagggctgtttcttaaagcctttgagactgttgaatagcttactccggaagcattggcgatgtctttaatggttacagtcattttggaccctccaaaacatctttaaaaatataatattgcaaattttcaaaaataattttatgataataaataacaacgttgttattataaatgatacatcataaaataacaatcatatacatcttccgaagaaaataacaacgttgttaaagaatttttcggatgatgaagcaacgtttatttttaacaacgttgttaaacttatcgtaaaggaggagatgtgtgagaaaaacgatcatctaatgcactaaaatattacacaaattgttacagaacataattggaaacgggattcaggggataaaccgaaacatacaatgcaaaaatttcacatattcgttcactattcgagcggaattgtaaacgctaccaaaaaaatatggcgatgaaagaaaacatgaatcgcaatcaatcattggttagaaagcaacggttatgagattcaaggagggtagttcatgagaaatatgctatccgtgttttttgtatgcgctttaatctttggaatgcttacggggtgtaaaagcagcgatgtaataggcgtcgataaaaccgtaacgttacggcttgctcacaaccataatgaggaacaccccatccacaagtctttactcaaattttcaaaagacgtagaaaagaaaaccaatggcaccgttaaagtgcaagtgtatccaaatgctcagctcggttcagaacgtgaagtgattgaattgacacagaccggggctgtcgatctggctaaagtaagtgcaagcgctttagaaagtttttcagaggtctactccatcttcagcttgccttatttatttgacagcaaacatcatttctatgaagccatggacagtgatattgcaaaagaaatgtatgatacaacgaaaaacatagggtttattggattaacctactatgatgcgggattacggaacttttacacaaagaacaaaccgattatgcacccaaatgaccttaaaggtttaaaaattcgggtgcagacgagtgctacagcgattcgaatggtggaactcatgggtggagcacctactccaatggcttatggagaagtatatacagcattgcagtcaagtgtaatcgatggcaccgaaaacaacgaaatggctttaacaagcagcaatcacggggaggtggcaaaagaatattcatactcagaacatgcaatcgttccggatattttgatcatgaatttggacaaaaaggatcaattaagcgaagaacagcagaatgcggtgatcgaagcggcgaaagagtctactgagtatcacaaaatcgtttgggctgaagaaactgaaaatgcggttgagaaagcaaaggaaatgggagtgaagttccacaagccagacaagactccattccgggatgcggtaagcccgcttcacgatgagtttgccaaaaaagaattgatcggaaaatactatagggaaattcgtgcgaaagctaaaaaagtaaaatgactctggatgaatgagcgactcgaatatttttcgataagggaggggtgtatatgctagctttaaaaaaagcagtgaataaaacgattgaatgtttgacttgcacactaatggccatcatggttttggttgcgatatggcaagtatttacgcgctatgtactgaattctcccagtacgttttcagaagaatttttacgctattcactgatatggatttctatgttgggcggtgcctatgcattttggaaaaaaaagcacttggcgattgaatttatcgttcgaaaacttccaataaaagcagctgttttcgttcatactttcattcagattcttttgattgcttttgctctgattgtgttggtgttaggaggttcgaaagcagtgatcaccacaatggagcaatcttcagcagcattagggataccggtgggatttgtttatctatcacttcctgttgcaggcatactcatcattggatacagcttggccggtttatatgaatctttacatgaattcaattcaaaacaaaagtcaggtgatgatgtaaaaaaagcagcaaagatgtgactgaggctttttgaaaactaaaaaagaggtgaaatgatatggccatagcagccggtctcattttatcggcggtattcttcatattgttgtttctcggcgttccgatttctgtaagtattgcggcggcatccattgtaacaatgcttaccatttttccttttgatgttgccattttcacttcggcgcaaaaaatggtcactggaatcgacagctttgctttattagcggtgccgttcttcattttatcaggcattattatgaataatggcggtattgcaatgcggctcattaacttcgcaaaattgatcagcggcaggctgcccggttctctggcccatacaaatgttgtcggaaacatgttattcggttccatttccggttcgtctgtagctgctgctgctgcaatcggcggggtcatgtcgccgcttcaagaaaaggaaggatatgaccggacttactctgccgcagtaaatattgcttcagcaccaactggtttgcttattccgcctagcggtcttttgatcattttctcattagtcagcggcggaacatctgttgccgctttatttatggcgggctatttgccgggaatcttgtgggggctggctacgatggttgtcgcctgtatgattgcaaaaaagaaaaaataccctgttgcgccaaagattacgattagtcaaggttttaaagtgcttctcgatgcgattccaagcctgttgctcattgtaatcgtaatcgggggtattatcgccggtgtatttacagcaactgaaggagcagcaatagcggtggcttattccttattgttgtcgctcttttataggacattgaaatggaaacagctccccaaaatgctgctggaaacggtagaaatcacagccgttattatgtttttggttgggacatcaacgatgctgtcattggtcatggcgtttacaggcataccgacggcaatcagcaatggaattttagggattacagataacccaattttgatcctgctgatgatgaatatcatcttattaataatcggtacatttatggacatcactccggctgtactaattttcactccaatctttctgccaattgttgaaagctttggcatggatcccgtgcattttggaattatgatcgtatttaacctttgtatcggcaatatcactcctcctgtaggaagtgctctgtttgtaggatgcagcataggtaaagttgatattgaacgagtggttaaaccgattctgccattttatgctgcgatcatgatcgtccttttaattgttacctacattccacaaatcagcttagtgttgcctcaattatttggactttaagacaggaggcgtctgtttaatgtcaattaaagaaacctatatgtttacatttatgaaagaagagaataatgtgctggattttcatttgaatgacggtcatgcacatgcgaaaatattcattcttgaagaagatataattcggattttgctgacggagggagaagcgttaacgcttgaaaaaacgtggagtgtcgcgcctggacagatcgatgtgccatgggagggacgccatcgtttagacatgagcggatttacattgcctcaatacgaattccagcaagtcaaagatgtttttatcgtgaaaaccggcaaggtcaagcttcatgttcaattgaacggctttaggatcagctggttttatcacaatggttctgaatggatcaatgttgcaaacgatcggcaaacacaagggtataattttgaaggggcttttggaaagggcgtgtaccattatttacaacgcgatgtccaggaacaatattttggatttggcgagaaaacgggaaacgtcgataaacacgggaaacgctaccggatgttaaatatcgacgcgatggggtacgacgcagagcggtcagatccgctatacaaacatatcccattctatattacacgtcataagaaaacaggcatctcctatggaatgttctatgataatctatcagcttccatttttgatatgggttcagagcttgataactatcatggactgtaccgctattatcaggccgaaaagggggatttagactactacttcatagccggtccgaaaataaaagatgtagtcgaaacattctcttggctgacaggcaaaacgatcttgccgccaaaatggagcctgggctattcaggctctacgatgagctataccgatgctccaaatgcacaagaacaattaaaaaatttcgttcgtctttgtgaagaacatgatatgttatgcgattcgtttcagttatcgtcaggatacacatctatcggtgataaacgttatgtctttaactgggatgagatcaaaattcctgctccaaaagagatggtgcaacacttccatgagaagggcgtccgtttatgcgccaacattaaaccgtgtttgctaaaggatcatccgtactttgatgaactacaagaaaaagacatgttcattgtaaacagagaaacacaaaaaccggaaatggcccaattttgggatgatatcggagcttatttagacttcacgaagcgccaaacgttcgactggtggaaggctcaagtaacagaaaagctgttggaatacggaattgattcaacttggaacgataataacgaatttgaaatatggagtcaaaatgccaagtgtcacggcttcggcaaagaagtggaatttgaactgatccgagcgcttcacccgcttttgatgatgaaagcgtctttcgaggcgcagctagaatacaacccggaattacgcccgtacctgatctcaagatccggctgtcccggcatgcaccgttatgcacaaacttggaccggtgacaaccgaacaagctggaaaacattaaaatttaatattaaaactggcatcggtttaagtttatcaggcatttacaatttcggccatgatgtcggcggattttcaggactggcccctgaaccggagctattcgtaagatgggtgcaaaacggtatcatgcatccgagatttaccattcattcgtggaacgatgacgggacagttaatgaaccatggatgtttccagaaacaatcgatgaaatccgtgaactcattaagtttagacataagatcatcccttacatttacaccgcgctatatgaggcgcacgaacagtatcagccgatcattcgaccgacattttatgattttgaacatgatgagaaaacatttgaagagaacgatgaatttatacttggtgaatctttgctcgttgcatctgtcgtcgaaaaaggaatgacggagcgggaagtatatttaccgaaccatgaaaaaggctggtatgatttccatacgggaacatggtatgaaggagggaagacagtcgttctgccggcaccattacattatactccgctattagcgaaagcgggagcgatcgttccggtaaatgatgcaaaagtgacattccaaacaaagaaccaagatgaaagaggatttttgttattcccattcaaaggaaaaggaaaatcgacttatcgtttgtatgaagatgatgggttaacaaatgaatatactcatacatttgcctttatacatgtcgatatggagacaacagaagacgggatcaaactttcaatacaaaaggaaggaacatacgagttatcgtatgatcaactcacttttcacgtaccaaatggagaaaagagaaaactgatcgtaaatggcacagaactggaaagcaaaaacggagcgttttcttacagtttgccgtgtgattaaaagattaaggccacatgatgaagatgtttccattaattcgagcaggaatctttgtccgcggttacatcccggccagctgaattttgtcatcgagcacgatacatgaatcatgatcatgaaaattttatgtaagcggatactaatcggcaaattctttgaaaaaaatcgttccaatatattgttatttcatgcgaaatgatgatatcgaatgttaaataataagagggaagaggatgggagaaccatgcaaatgacgtttcgatggtatggagacagcgacccggtcacattagagtatattcgccaaattcccggcgttactggaattgtttcggccatttatgatattcctgtaggggaagcatggccttatgagaaaattgtagagttaaaagaaaaaattgaaaatcatggtttatcgttaagtgtcattgaaagtgtacctgtccatgaagatattaaattaggtcttccgacaagagatcaatatattgaaaactataaaacgacgatacgcaacttggcaaaagccggtgttaaaatcgtttgttataatttcatgccggtctttgactggacccgttcttctttagactatgcactagaagacggttctacagcattaatttatgaagaagaaaaagttagacaaatgaatccattacatggtgaactaaaacttcccggttgggacacaagctatgaagatggacagctaaagaatctttttcaacaatatcagcacatgacggaagaggatttatgggaaaatctttcgtattttattaaagcggttataccggcggcagaaaatgaacaagtcaaaatggcgattcacccggatgatccgccatggcctatctttggactgcctcgaatcataacgaacaaagagaatttggagcgattgattcatctctatgacagctcctttaacggtttgtgtttatgcagcgggtcactgggtgtgaagtcaacaaatgatattccggaattgattcgttatttcggaaaaaaaggaaaagttaactttgtgcacctgagaaacattaagatcatcggggaaaagtcatttcaagaatcctcccaccgttcagaagacggttctttagatatgtatgaaatcgtaagagcattaagagatatagattttgccggaccagccagaccggatcatggaaggatgatttggggagagaccggaaaaccgggttatggtttatatgaccgggcgcttggtgcagtgtatttaaatggaatgtgggaaacattgacgaaagaaaagaagcggatagccttagaatgcaataaatgaacaagcactaactaaaatgcagagacgagggataaatgtgcagattccttttcatgtcaacttgaaagataaggtggctgtagtgacaggtggaagcggcatcttatgcagcggtttcgctaaagcattagctcaatgcggtgcaaaagtagcagtagtcagccgaagagctgaatcggcagacagagtagcgagagatatccaagaaaacggaggcgaagcacttgccgttacagcaaacgtccttgataaacaaagccttgaacaagcgaaacaactcattaacagaacattcggcagatgcaatatcctcattaacggagcaggcggcaatcatccaatgggaacaacagataaagaatatttatataaaaaagacttgaatactaaagaattgactacgttttttgatttagaaatagagggtgtaaggtctgtattggatttaaactttcttggtacactgttaaccactcaagtatttgcaaaagacatggctgatcacgacggaaatgtgatcgttaacatctcatccatgaacgcctatacgccgctgacgaaaattcccgcctacagcggtgcaaaagcggccgtcagtaactttacacaatggcttgctgtgcatatgtcaaaagtcggaattcgtgtcaatgccattgccccaggcttttttcttaccgcccaaaataggagcctattgctcaatgaagacggaacatatacggagcgagcacaaaaaattatcaaccagacgccgttggatagatttggggttccggaagatctaatcggaacgttattatggttggtaagcgataaagcctcgcgatttgtcactggaaccatcataccggtcgatggaggattctccgcctattctggagtataactaacggggttagctccaaaaagctgattttcaacactgataaaaatcccaatttctctgtgtcacattgagaaattgggatttattatttcaacttttccgttttacaaacaagaagataaacaacatttttgtatgatctgccatgctggaaacaggaggttttctgctgctacgtaatacaaaaccatcgcaaataatatgcattgttttgtgatggtttgacaacagtgttataactgtttatattgtatatatacagttataacgaatagagggatgtcatgctttgaatatcatcatttcaaattcatctgatgaaccgatttatttgcagatcgtcaaccaattaaaagatcaaatcgtcaagggagaactctcagagtcagaggcgctcccgtcgatcagaaacctggccaaagagcttaaaatcagcgtaattacaacaaaaagagcctatgacgagctggagagagaagggtttatcgtcacagtcgcgggaaagggctcgtatgtcgcagccattaacaaggacatgctgcgggaaacaaaagtcaaattaatcgaagaacacatagcagaagccgttactgaagcgaaacaaatcggctttacatacgaagaactccaagagatgctcaaactggtttatgaggagtggtaaaagtgaccagcatactggaattaaagaatgtaacaaaacactatcaagatttctctttaaaaaacatcaacttctcgcttgagaaaggttatattatgggttttatcggcccgaacggagccggaaaaagcacgaccatcaagctgatcatgaacctgatcaaaaaagacgaagggaacatcagcattttcggtctcgacaatgaaaaacacaatatcgaaatcaagcagagaatcggctttgtatacgatgaaaatcatttttacgaagaactgacaccaaacgaaatgaaaggaatcatcagaccgttttacaaaaagtgggacgaagctgtttttcagcggtacgcaaaagacttccagctccctttaaacaaacagatcaaaaacttgtcaaaagggatgaagatgaaattctcattggcggtcgcgctttcccatcatgccgaattattgatcatggatgaaccgacatcaggactggatccgcttgtcaggtccgagctcctcgacgtgctgcaaacattgctgcaggacgagaacaagtcgattttcttttcgacgcatattacctctgatttagaaaaagtagcggactatattactttcattcataacggccggctcgtgctgagcaagacaaaggatgagctgttggaggagtactgcattgtgaaaggagacctcgatacgctgcgcaaagggaacgaagacgccttaatcggcatcaagaaaaaccgctatggttttgaagcgctctccagagataagcgggaagtcgttcagcatttcggggattccgtcatgatagaaaaacccactttggaagatattttggtattttcaaccggcaggagtgatcatcgtgtatcatctaattaaaaaagatattttaatgcagaaaagggcaatgaagctatcgctgttattgatgatttttttcacttttacattgtcgcagcttgagcttgtcggatatacggtcgctgtattggctgtcacgtaccagctggcattaggcgcaagctccttggaagacaaaaacaacagtgacaaaatcctgatcagcttgcctattaaaagaaacatcatcgtattatcgaaatatgtatcggtttatgtctatgcggcttatgccattctcttctattctttgatcaatgcggtcggacatttgctgcacttgccgcttgatttcccattgacattttcaggagcgatgggtgctgttgtggctgtcactttatttagctcgatctcatttccgctgatttttaagtacggctatttgaagtccaaaatggcgaatatcctcatatttttcttcattatttttggaggaacagccttttttaaatttatagacgcggacgagaaccttgcattgagccaaaaattaacggcttttctgagcggaatgtcaaatgcgggtacattcatccttttggttggtgtactgctcgtgatgatctccgtttcatacgcgatatcgctcagcttttataataaaagagaattttaatgtttaaggatcggcgggagcagcaccgttgatcctttttccgttgctcagaaccgtgcggctgttttcattctgccgtctgcttttctctttcccctcactatcatctattataaaaaattcctataaaagaaaaatttccgagttgattaaaagcattttttccggaagtttcggtaaaaaacgaaacttttggcccttttatttcactgtataatgtaaacggttacgtatatagtatacttatactaacatttcttttaagtgaaactgacgggaaggatagaaaaacaggtgagagagatatgaatacgaggcaaaaagacattctgaatctgttgttatctgaacctgatgactatttagtcgtacaagatttcgcagacagggtaaagtgttctgaaaaaacgatcagaaatgatctgaaaacgattgaagactatctcaatcagcattctgatgctcaattaattcgcaaaccgggattgggcgtttatttgaatattgaagatcaagaaagagtccgtttaagccggcaattatataccgaacatcacgccgcacagcagctacccgatgaagaaagaatgctgcaaatcgcttatcagctattaatgaatccaaagccggtttctgcaaaagaaatggctgccgagcatttcttgaataagtcttccatcaaaagggatttgaataaaattgacgtttggctgaagcggtttggcctcacactggtatccaagcagcgcctcggtttaaagatcgaaggaagtgaaaaaaataagagaaaagcgctggcgcgcatctcggagttgattgacaacccggagtttacaagccgatttattaaaagtaaatttttaagccatgaagtggaatttgttaaaagtgagatcagatcattgcaaaggcggcattctttatatttcactgatgaaacgttcgaaaatttactgttgcatacattgctgatgatccgccgcatcaaaatgaaacagccgatcaccatttcgccgggggaaatcgatgcagtcaaaaagaaaaaagaatttcagtggacgtttgcctgtttaaaacggctggaagctgtttttgcgatccgctttcctgaagaagaggccgtctatttaacattgcatatattaggcggaaaagttcgctacccatttggaaaagaaggggacagcggactggaaaaccctttgcttccaaaggttgtcgaatatttaatcaatcgcgtatcagagttgaaaatgatggatttccgcgaggaccgggttttgatcaatggattgaaagttcaccttaataccgttttaaaccggctgagctatgacctttccgtatcaaatccgatgctcaatgatatcaaaaaaatgtacccttatctgtttcatattgtcattgatgctcttgaagacatcaaccaaacgttttcactttcgattcccgaggaagaagccgcctatctgacattgcatttccaagcggcgatcgagcgcttcagctatggaaaagacaagcataaaaaagcgatcatcgtttgtcatatgggcatcggaatgtcacagctgctgcggacaaaaatcgaacggaaattccaccaaattgccgtgatggactgcatcgcgaaagcagatttggcggactatactgcaagatataaagatatcgagcttgtcatatcaacggtcagcctggaggatttatcaattcctcatattgttgtatcaccgctgctcgagtcggctgatgagaaaaagctcagcgactttatggatcagctcggtgaatcgacccgccaaaaacaaaaaacgtttaaagtgctgaacgacacgactccttttctcgttttcttgcagcaagagtcagaacaccgctacaagctgattgaacagctggcaatcgctttatacgagaaaggctatgtggaaaaagaatatgccgtacacgccgtcttgagagagaaaatgtcggcgacaaacatcggagcgggcatcgcgattccccacgcgaacgccaaattgattaaacaatcagccattgcgatcgccacattaaaggagccgcttgactggggctctgaaaaagtatcgctcgtctttatgctggctgtcaaacatgaggatcaaaacatgacaaaacaattgttccaagagctgtccagcttaagcgagcagccggccttcatccaaaagctgacgaaagaaacaaatgtgatgaagttcttatcttatttggattattaaaagcggggcgctgacctttatcaaaattcaattagaaggcctttatcacttcatttccaccgtgccgcccaactgaaaaaacatcatatctttttctaaaggtagggtttcctaatgaattatgatgaagcacaacatctacatattagttacaataaaaagggattagatcttgaagcggtaggattaaaacgcctagatatcgatgtgtgggacgtgtattttaactttcaggatcatgggatagatgagccacctttgagtttttcaaaaatcgatccattcggttgcaatatactttcaataacaagcaaagatttaaagattaatgaggctactcaatacttcgaactttggattaaacatgagttatataaagatctctaatttatagctccccactgaaaaagaagtggagttttatagtgcaagtagaccgttgagaaagaataaacacattagcaatagggaaaggagcattccaaaaaatgaaacacaatcattaggatgatgatataatcaatagaaagggatggacgaattggataatcaagttttgcaagcgatctacgaaatgcaaaaggaaatgaaagaagacttcaaaagcgtaaacgagcggttagatacaatcaacaaaacattaacacgcatagaggaaaacgatcctgaaaaagtcatatccatgcttaaactaatcaataagaaacattgaacgtgatcatagatacaacgacaagaagttctctgagcttgaaagaaggattcatgagttagaggaacgattaaataattattctgtattataaaaagaaatgatgaaatctgtttcagcatcaacgaatatatcgtctatttcggcgtcctttataatcttttgaaatatttgtccagagccatgaattagtgaggagtagatttctttctaattcaacaggtttggacacttttttatttctccaataggatgattaatttttcacaatgaaacgagctgaatactggttgatgaagagcatagaaattgttactttttttgtctagtttctgtataacaagcaaaagctgaaaaagagaaagaaaaggtgtcctgatggatgtctttttattttgaatttgaaggtgaaaaacattgcggacaccggaaaaagagtctgccgagatggtacgaaaaaagcaggccgcccatctgcttagtctgtcttagctttcttccatctactcttaataatcaccataaacaaaatgtgaatcaatacaacgatgatattatacttagggtcaatttttacaaagacggtattaagagtcatcactagaaccatgagaattgttgcgatccaccatataaactcatactttttatcattctgatctttgctctttttacgtttaaccaggtcaaaatgcaaacaagcagccacaaaaaccactaaaacaattgttgtcacagggaaagaaaagtttgattttatgttatacattataactgcccctaaagccccgaatataaaactaataagtaatctcatcattgatatcatacctttcttaattttttattaaatcataatcagagctttcgggcactaggaatgagatattttttaaagaagcatccccatttcatcaataccatcagatattttcttttcactggggttttcttcgaataccctcatcaaaataaccttcataaagaggatgtcctatgtttacaccccctcgacaaatttcagctccctattgcaatacggcacatttttttcaaattcagtcccatatgtttttacaagtcgccgctcactgcagtcctgctttaaaaaaaccgatttttccggagcctgcggtaaaaaacaacgcttttacacgcacgtttttattataaagtaatgacaagagctgctcactactttagtttcagaaggaggattcgcatgaaactgttagcgattacatcatgtccaaacggcattgcccatacgtatatggctgcggaaaatttgcaaaaagcggccgatcgaatgggcgttcaaatgaaagtcgaaacacaaggcggcatcggggtggaaaatgagctgaccgagcaggaaatccgcgaggctgacgcgattattatagccgcagaccgctcggtcaacaaagaccgttttatcggaaaaaaacttctggctgtcggtgttcaggaaggcatccgaaaaccggaagaattaatacaaaaagcgatcggcggcgatatacctgtctatcgttcggctgtgaaaacggaagcctccgctcaaacggagaaaaagcaaaatccgatttacaggcatttaatgaacggtgtatcgtttatggttcctttcattgtcgtcggcggattattgattgcggtcgcattgacgcttggaggcgaaaagacgccgaaagggttagtgatccctgatgattctttttggaaaacgattgagcaaatcggggcagcctcattctcattcatgatcccgattttagccggttacatcgcctacagtatcgccgataaaccggggcttgtgccgggaatgatcggcggatacatcgcagcgacgggaagcttttacggcagcgggagcggtgcagggttcctcggcggcattatcgcgggctttctagccggatatgcggcgctggccatcaaaaaattaaaagtgccaaaagccatacagccgatcatgccgatcatcgtcataccggtggtttcctcgctcattgtaggcttggcgttcgtattgctgatcggcgcgcctgtcgcgcaaatctttgaatcattgacggtttggctggctggtatgcagggctcaagctcgattctgctggcattaattttaggggcgatgatctcatttgatatgggcggccccgtcaataaagtggcattcttgtttggctcggccatgatcggtgaaggcaactatgaaattatgggaccgatcgccgtcgccatttgtattcctccgatcgggcttggaatcgcaacgtttttagggaaaagaaaatttcaggcgcaagaaagagaaatgggaaaagcagcatttacaatgggattattcggcattactgaaggcgccatcccgtttgctgcacaggatccgctccgcgtcataccaagtattatggcgggttcaatgacaggttccgtgatcgccatgatcggtaatgtaggggacagagtcgcccacggcggaccgatcgtagcggtgcttggcgctgtcgatcatgtgttgatgttctttatcgctgttattgccggatccctggttacctctcttttggtcaatgtgctcaaaaaagaggtcacagctgcacccgcagggataagtgaagctgctgcagggaacgacattccccaaccgaacatcgaaatcgaagcggaaagcaaaaaaatcgaaaagccggaaattacaaagctcacagacatcatcgatacagatttgatcgaacctcatttgtcaggagatacgagagacgacattattgatgaaatgatccaaaaattgtcccggaaaggcgtactgcattcagaaagcgaatttaaacaagctatcatcaatcgcgaacttgagggtacaacggcgatcggtatgaatatcgcgatcccgcacgggaagtctgatgccgtcaagaagccgagtgtagcattcggcattaaacgttcgggcgtagactggaggagtcttgacggaactgacgccaaactgatttttatgatcgccgtcccgaaagaaagcggaggaaacgagcatctgaagcttctgcaaatgctctccagaaaactgatggatgacacctaccgggacaagcttctctctgcccaaacaaaagaagaagcatacaaacttctggatgaaatcatctaaaaaaggaggacgcccgtcatgactgaaccgttatttttcgagcctgtttttaaagaaagaatatggggcggaacggctttagcctctttcggctatgacattccatccgaacaaacaggggagtgctgggctttcgccgcacatcaaaatggacaaagcgtcgtgaaaaacggcttgtataaagggctcacattaagcgaattatgggatgaacaccgtcatttattcggacatataaagggagaccgctttcctcttttgacaaaaattttggacgccgaccaagacctatccgtacaagtgcatccaaatgatgaatatgcaaagctgcacgaaaacggggagcttggaaagacggaatgctggtatatcattgattgcaaggaagatgcggagatcatttacggccaccatgccaagacgcgggaagaactggtctcaatgatcgaaaacggaaaatggaatgagcttttgcgccgcgtcaaagtgaagccgggagatttcttctatgtgccgagcggaaccgtccatgcgatcggaaaaggcattttgattttggagacgcagcagaattctgacacaacctacagactatatgattatgacagaaaagacgctgaaggaaacctgcgcgagctccatttgcaaaaaagcatagaagtgatcgacgttccgtcttcccctgatcgcgaaaccgttcaatacgaaacatcgggcgacgtcaagactgccgcactgattgattgtccttatttctcagtagaaaaatgggatgtaaaaggatcggcctgtttcaaacaggataaaccgtttcttcttgccagcgtcatagaaggggaagggcgcatcgcatctggcggccataacttttcatttaaaaaaggagatcacatgctgctgccctggggctttggagaatttacgctcgccggccatgcggaatgtatcgtctcaagcttatcaattgaataaacgatcagcggcgccctttctgaacagaccataaaactatggtctgttttatttttgcaaaaaaaataatctcgacttgccaagacgtgttcacagagggctgacaatgcatattcccaagctttcacaagtaaaatagagtaaaccaaaaaaacatttggaaatcttccaattatttgataagctgatattaaaagcttcatatctttcatcagctgcactgcccgggacttttcgcggaacagctgcttcatgaaacaaaaaggcggtcctatgttccggcgtctggcaagaaaagcctgctaaatgaccgaaacaaccgtgcccttcataattggttggtccttatctggatgagaaaaggagacgatgattcgtatcagcaaaaatgtaagcggattcatcgtctttttatctcggtttatcactctttttagcggaagcgaggaggtaagcaatggggaaagcaaaacttcgatggaatgaacccttgatttctcaacacgaatcggctgctgaaggatttacaccggaagatttcacagaggaagatcgactgatttcaaaaacgacagaatcatttgtcaaaaacgaagtcatgccccttcttgaatcgattgatcagcaggatcacgaaagcgtgaaaaaattgtttcaaaaagcaggagagctcggtttgctcagtatcgaagttccggaggattgcggcggcctttcactcagcaagaagctttccgggttggtggcagagaaaatgggagccggcggatcgttcagcgtctcctttaatattcatgcgggagtcgggacactaccgtatatttattatggaacagaggaacaaaaacaaaaataccttccaaaactggcatcgggcgaatggatcggagcatatgctctgacagagccgggcgcaggatcggatgctttaaacgcaaaaacgacagccgtcttgaatagggaagggacagcctggattttaaatggggaaaagcagtggattacgaacgcgcaagtagctgatgtatatgttgtctttgcaaaaacggcggaaggcatgacagcatttatcgtcgaacgctcgtttaaaggtgtttccatcggacctgaagagaagaagatgggaatcaaagggtcttcgacagcaaccttaatcttggaggaagtcgaggtgccaagcgacaatgttctaggtcatatcgggaaaggtcatcacgtcgctttgaacattttaaacatggcccgcttaaagctcgcgttttcgaacattggaacggcaaaacaagcattgaaccttgctgttagctacgccaaacagcgaaagcaatttaacaagccgatcatcggtttttcaatgattcaagaaaagattgccgacatggcggtctcgattttcggcgcggaaagcgctgcttacagaacggcagattgcttggacaatgttttagattcggctctcccattagacgatagactgagaaaactcacaaactatgcatccgaatgtgcgatcaataaagtttactgctccgaaatcctcggccggatcgcagacgaagcggtgcagattcatggcggctacggatacatgcaggagtacgaagtcgaacgattgtaccgggacgcgaggatcagccggattttcgaggggacaaatgaaataaaccgcttaacgatcgccaaactgctcatgaaagaagtgcagcaaaacggcatctcagagccggaagctcaactaggcagcgagggaaatcgaaaccggcgatttattcagctgtccaacaggcttttcggcaagacactgaaagcgcttatccgctctcgcgtgaacactcaagaagatcaggaatacgcacggcttctcgccgacatgaaaaaagaaatctatgtgatggaatccgccgcccgccgaaccgaaaaagctaggcaaatatacggtggtgaaaaagcacggttgaaagaaatgatgacgaatgtcatttgtgaagaaggctaccgcagaatcgaagagatggcggtgaccgccttatcaagcatagcatctgatgaagccgaaagaaaactcgcatttgaagaggctcgcagcctttctttgcctcttttcagcaatctgtttactcaaaaacgcgaaatcgcagaaaaaatagccgctcatgaaaaatatacggtgtgatcggagggaaactgtttgaaaaaaatcggatttatcggtttgggcaatatgggtctgccaatgtcgaagaatctgcttcaggagaactttacggtttatggaatggaccttaacaaagaagctgaattggccttgcatcatgcaggaggaacgatcgggatttcagttgaaaaaatggttgaagagtgtgacgccatcctcacaagccttccttcctcaaacgctgcagaggaggtttttctgggaaaaaaagggctcgtacacctggctgaaccgggcgtcctcctgatcgatacaagcacggtcgctcctgaactgaatatccgaattgcggaggaagcgaaaagcaaaggtatcgattttcttgcggcgccggtcagcggcggtgtgatcggggcggtcaaccggacgctgacctttatggtcgggggtccgaagtccgtttttgataaagcgttgcctgttttcaatgcattgggcgagaatatttttcatgtgaacgaaaacatcgacagcggaacgaatacaaagctgatcaacaacctcttaatcggtttttatacagccggcgtcagtgaagccttgcaccttgccaaaaacagcaatctcgacctcgaccaattgtttgagatgctgaacgtcagctatgggcagagccggatctatgagcgcaactataaaagtttcatagcggatgaaaactataaacctggcttttctttgaagctgctgctgaaagaccttggctttgcattggatttggctgagaagaacaacgttgaactgccggtgagcaagattctcttcggcatttacgaagaagccgatcagaacggatacggggaaaaagatatgtctgttttatacaaaaaaataagcgaacagaagacaacttatcagtaaggagaggtgagaaatcaaatgatcacaaccaatgcaaaaaaaatgatgaaccatatcgacggggaatgggtgaattctctaggtgcggaatcggaagaagtcgtcaatcctgcaaacggaaacgtcatcgcttatgcgcctctatctgtgagagcggatgtagatcgtgccgtgcaggctgccaagcacgcttatcagacctggtcgcttgtgcccgtccccaatcgggcaaggcttttatacaagtatttacagcttctccaggagcaaaaagaacaattggcagacattattacgacggaaaacggcaaaacgttaaaagacgcccgcggcgaagtgcagcggggaatcgaagttgttgagcttgcgacagccacacctactttaatgatgggagaatccctgcccgcgatagccgggggcatcgacggatcgatttggcgctatcctttgggagtcgtcgccggcattacgccgtttaactttccaatgatggttcccctgtggatgtttccgctcgccatcgcctgcggaaacacgttcgtcctgaaaccttcggaacggactcctattcttgccgggaagcttgttgagctgttctatgaagccgggtttccaaaaggtgtgttaaacctcgtccatggaggaaaggatgttgtaaacggaatattggagaacgatgatattaaagccgtctccttcgttggttcagaaccggtcgcaaaatatgtgtatcaaacgggcacagccaacgggaaacgcgttcaggcgctggccggcgctaaaaaccatgcgattgttatgccggattgccatcttgaaaagactgttcaaggcatcatcggtgcggcattcggcagcagcggggaacgctgtatggcctgctccgttgcggcggtcgttgatgacatcgccgatgacttcatggaaatgctcgtctctgaaacacggaagctgaagacaggagacggcagatccgaggatcactttgtcggcccgctgatccgcgaagtccataaacaacgcgtccttgactatatcgacagcggtataaaagaaggggccgcactcgccgtagacggacgcaatccggatgttcgagaaggatactttgtgggagccacgattttcgatcatgtgacaccagagatgaaaatctggcaggacgaaatctttgcaccggtcttgagcgtcgtccgtgtacaagatcttgacgaggggatcgagctcgccaatcaatccaagtttgccaacggcgctgtcatctacacatcgagcgggaaaagcgcccagcagttccgcgacaaaatcgatgccggaatgatcggcgtcaatgtcaacgtcccggctccgatggcgttcttctccttcgcagggaacaaagcctctttctatggagatcttgggacaaacggaaaggacggcgtccagttttacacgcgtaaaaaggtcgtcaccgaacgctggttctaatccttaacataaggctccctctcatgcacaactgattttttttcagaggggccttttttatttaatcagggagggatcaatattgaacttgaaatatgccacacttaaaacagaacatggcatcacaaccgtgacgttgaacaatccgccggcaaatacactttcttcttcctgtatcgccgaattgcgctctctttttcgggaattggcccgcgacgaggagacaaaagcaatcatcattactggagaaggccgcttttttgtggcgggagcggatataaaagaattcgtttcaaaacttggggaccaaaaacaaggattggcgctcgcacaagggggccaggcgctctgcgatgaaatcgaagcttccaaaaaacccgtcattgcggcgataaacggaccggctcttggcggaggcctggaactcgcgatgagctgccacttcagaatcgtatcagacgatgcaacagtcggtcttcccgaattaaagctcggcttgattcctgcatttggtggtacacagcggcttcgcaacataacggacacagcgacagcactcgaccttatcctgacgggccgatcgctttcagctcaagaggcggtagagctgaaaattgcacagatggctgtaaagggagaggaactgatgaagacggcagctgctgtcgcgtcgtcttttatcgaaggaaaaagcatgaccagcgtgaggcgcgccgtcgaatgtgtcgtacagggcgccagcgaaagcatggaacaagcactggagagggagcgaaacagattcgccgagctgtttgtcacttcagatgccaaagaaggaattcacgcatttgtcgaaaagcgcaaaccaaactttcatcattcataaaaggagtggatcaagatgtccgatgacgtgctgttttccgtcaatcaaaacggcgccgcagcgattgttctgaatcgcccgaaagcgctcaactcactcacatacgacatggtccgtctgattggtgaaaagttaaacgagtgggagacagatcaaaacgtttctatcgtggtcatcaaaggtgcaggaccaaaaggactatgtgccggaggggatattaaggcactctatgaagctcgttcgtcaaaacaggccctgcaagatgccgagcgcttttttgaaacagagtacgaagtcgatatggcagtccatcgattttcgaaaccgatcatcgcctgcttggacgggatcgtcatggggggaggcgtcggcctgacgtacggggccagccaccggatcgtcacggagaggacaaaatgggcgatgcccgaaatgaatatcggcttctttccggatgtcggggcagcctattttttaaacaaagccccgggccgcttagggcggtatcttggattaacggcgtctgtcatccatgcagccgacgtgctgtatatcaatggggcagacgcctacatggagagcggcgctttagaacgattgcttcaagcagtggaacaaaccgattggcgccttgcaagcgttgaagaaaagctcgatcagctgatccgcgaatcgaaaacggagccctcccaggagagcacgctcgcccgtgatcagcaagcgattgaccgtcattttaagtatgataagctggaagagatccttcaatcgctcgaaagcgagggaagcacctttagctcgaatgtgaaaaaaacaatgctttccaaatcgccattttcattaaaaatcacattgaaacagctggcggacggacgtcaaaaaacactggaagaatgctttgccacggatctggtgctggcaaagaactttttgaagcacaatgatttcttcgaaggcgtcaggtccgtcctgatcgaccgtgatcaatcaccgaactacaagtaccggaacgtttcagatgtaaccgatgaagcggtggaccggtttttccaaccctctgaatctgtccggttttaaaagcgggagctgaccattagcgtcagctctttttttgtaagaaccttattatagaggtatatatttcgatatggagaatatgtatactgacaatatttggttagaggttgacaacatgaacatcggaaaattaagcaagtatttcttgtcactagccattgcccttgcgacgattctgtcctttcatgccgtttctgcaaatgctgcatcagttggtactattaaaccaagcgaatgctcaactcacatcttcaccgtatacgacgaaacagttggcattggcggttccggccgtgcgcatttctattgcggcagtataaatggaggtcctcaaattgaattttcggacgaagatttagaggttgcggtcgatgacccctttattctccatgcatatgctaatccgagcatgaactcggtagactacgaaggacgccaaaagggagatgcggaggtaacgatttattggaaaaacaagccggagggcaccaaatacacatttttattagtgcaaaataaataattgctgcatcctgcctgagaaggctatggcggtggtctggaatcgccggctgagcatttacacaatagccgttttacgcggcactattaaaaagaactctccaaattcggagggttcttacattttattcattatactggcgacgaagcagctataatcggtagaataagaagaagcaagatatcatcctgaaaaggaaggaacaaggaaaaaaaccatgatgtttttattcatttttatcatcatcttagctgcggctgttttattgttcatcaatttacatcctgtgtttggaggaaatccaagcaaggaacaaaaaaagctgtatcaaagctttgacaattatgccgatggcaaatttcttaatcaaacacaagaaaagatggatatgggcggaatatccggagttttctcaatgatgagagacgctgtttccggcggcaaggagcgcaatccttccgatcaaatccctgtttctgagattgattggaacatcgttaaaagtaacgaagacagcttaacatggtttggacattccgcttttttactgagcatcgaccgcaaaaaaatactcgtagaccctatgctgggtccaattgcttcacccgtatcattcatcggaagcagacgctacagcgaagacatcctgcatacggtcaatgatatgccgccgattgacgccgtcttgattacacatgaccattatgatcacttagattatccatccatcttaaagctgaaggaaaaggccggtcatttcttcgttccttacggaatcagcgcacacttgatccggtggggaattgagaaagaaaaaatcaccgaactcaattggtgggatgaaacggagtttcaaggtttgacaatagccctgacaccgtccaaacacttttcaggcagaggattattgaatcgaaacacgaccctgtggggcggctgggtcatcctcggaaaacatacgcgtttttatacgagcggtgacgggggatatgatgaacactttaaggaaatcggcaaaaaatacggccctttcgatatcacattaatggaaggcggccaatatgacagacgctggtccgggattcatatgacacccgaacaatctgtacaagcccataaagatgtaaaaggaaagaacatgatgttgattcattggggagcctttaccctcgcataccacggctggaaagagccgattgaacgcgcattgaacagccaatactcgcttcccgaaaccttttggtgggatatataagcaggtcgtttatctgtatataaagcatcctttttaaattaagaaaaaagccgtttccagcgcaggccggagacggctttttctcagcaaatttcacaaaatcccttgcgttaaagtgggctttaacgattattctgtagatgcagcttagaaaagaatttcgtagccttaatcgaaaaagaagcaaggagagagttatggtgttagtaacaaaatcaacagttcggctcccccgggggcttcaggccaggcatacgaccctatttgtccgcaaagcgatttcattcaaaagtgaaatcgtactcgctaaaaacgggcagacagcaaacgggaaagatctgatggaaatccttcaattaggagtgcaagaaggggatgagatcacgttaatggtctatggtacggatgagcaagccgcaaaggagactttggaaaaatttcttttgaatgtagtgccataattgaaagcgcgccggcacttatcaaattacttttcatccgctttcaaggacattgcctgattctttttttctaatccatcatagtacatgattttctcatcgatttttaaaaaggcgcgttccaggactctttgcttttcaagcattttttctttatgtttttcaagtatttgtttgcgcttcgagatggtccaatctccttcttttgttaaattgacgatttcccgtaattccgaaagcgcaatgtcagttttccgcaagcatatcacaagctccaaccatgacaagtctttttcttcaaaaatgcggtttccatttgcgtctcttttaataaaaggcagaagaccttctttttcataatatcggagtgtatgtgtaggcaaacctactttttcagcaacttcttttatagaataccccattttgaaacctccatcatattcatcaaaattctaattggatgtgtcacaacacacaatgattatagaccttaaagtggactttaacgcaagccgaagaagatttcagaaaaacctcttgccttaaagcgaactttaaggtttaaccttaacttgcacctcttctctatgaattggcgtaatataacgtaagaaaggatcgatatggatgtgtaatctgcataaaaccatctcaacccgtgtactgagtgctccgagagccaaggcgaaatttgaacagaccacaattgaaagaagggaattacaaccgaatgacgttttaatcgatattaagtacagcggcatttgccattcggatatccatagcgcgtacgatgaatggggaggcggaatcttcccaatggttccgggacatgaaatcgccggcatcgtcaaagcagttgggacaagtgttaaaaaatttgctgtcggcgaccgcgtgggggtcggctgcttcgttgactcttgcggcgaatgtgaatactgccagagcggagaggagcaattttgtacgaaaggcgtgatccaaacgtataactgtttagactacgatggaaatccgacatatggcggttacagccaatacatcgtggttaaagaagattttgttgtccgcattccggacagcctgaacttggatgttgcaagcccgctcttgtgcgcaggcatcaccacgtactctcctttgaagcattggaacgcaggccccggcaagaaagttgccgttgtgggaatggggggactcggccacgtcgccatccaatttgcgcatgccatgggggcagaagtaacggtcttaagccgctctttgaataaacaggaagaagccttgcgttttggcgcagatcattactttgcaactggcgaccctgcagtattcactgagctggccggacgctttgatcttattttaaacacggtgtccgccaatctggacgttgatgcatacttatcgcttcttcgcgccgatggaacacttgttaacgtcggcgcgccggcagaacgggatcagtacagtgtgttttccttaatcatgggccgccgcagcattgcaggttcgcttgtcggcggcattcgggagacacaagagatgcttgatttcgctgctgaacacggcttggctccgcaaattgaggtcatcggagctgaccaagtagatgaagcatatgagcgcgtcctcaaaagcgatgtgcgttatcgattcgtgattgatgtctctactttgtaaatcatatataataacagataggccagtcattttatttgactggccgcttttcttagcttttgccccgcatgacccggcaatttcagccgagcgaatgaagataccattctatatatctccttgttctataacgagcagagagccgaacagggattggcggccttggtttatgcgacaagggatcggggccgaggcgtcctgccatcaattagatttccttaccgctctcataatgacatatacgatccccgaatcctattaataccgaaatgattgcaggccctaatggcatttcacaacctcccaaaaagagaatttactttccatcgttatttttacattatgtaacaaactttcaaatcaattccaaaggaggagtgcgacgtaatttttatacagactaaacctttgacaatacgagcaacagctactatagtaggatagtacttttatttaatatttactgataattcaggacatttattttgaaaatttttatcgcgctacactgctgactactaaaaacgcactaatagcttaacccgaatcggaggactcatgatggcaaaaaaaattcctttttcatttatcctaatcataggattaatgctattcgcattatttttcggtgcaggaaatctcattttcccgcctatgctgggtcagatggccggagagaatgtatggacagccaatgcaggattcttggtgaccggagtcggattgccattgctcgccattacggcattcgttttttcaggaaaaaatgatttgcagtctctggccagtcgtgtgcatccgttgttcggcattgtatttacaacggttctctatttagcaatcggccctttttttgcgattcccagatccggcaatgtgtcgtttgaaataggggttaaaccttttttatcaaatgatgcgggccctgttgccttaatcatatttaccgtattatttttcactgtggcatgcttgctgtccctgaatccaactaaaattatcgatgtaatcggaaaatttctaactcctattaaattaacatttatcggattgctcgttgttacggctattattcatccaatcggaagctttcaagctccgtctgaaggatatgcatcacacgtattttttaaaggattcaaagaaggttactttactcttgatgcccttgtcgcttttgtatttggaatcatcattgtgaacgccatgaaagagaagggagcggcctccaaaaaacagctcataatcgtttgtgcaaaatcgacggcgattgcagcggcgctcttggctctgatctattcagcgctttcatatatgggggcttccagcgttgaaaaactgggtcttttagaaaatggagccgaggttttggcaaaggtttcatcctattatttcggaccatatggttccgtttttttgggcttaatgataactgtagcatgtctgacaacaagtgtgggactcatcacagcatgctcttcgtttttccacggcttgtttccaaacatctcctataaaaaaattgctgtcattctgtcaatgttcagcacccttgtagcaaatataggattaacacagctgattaacgtttcaatgccggttttaacaactttgtatcccattgcgatttctttaatattcttaacatttttacatcctttatttaaagggaagagggaagtgtatcaaggcagtctgatattgacctttatcatcagcctgtttgacggcctgaatgctgccggactcaaaattgcagctattaatcaatttttcaatcagtttctcccgatgtatgacatcggattaggatgggtgcttccggcgattttaggaggaataggcggctatctcattcatagactccggaagtgctgaataaactcataaatatgaaggcaaccctatgatcccagggttgcctttttctttcaaatgtttgcgatggttttccataaatggatattctataatggtgttagtttatccattttgaaaagaaaagagtgctgagtatgagaaaatggtattttattttatcagcgtgtattttagtttctgttatcatcgcttttgcttacgataagaccggagcaaaagaagcagaaccggctaacagcttgtatgtttcccccgatggaaatgatcaaaatgaaggaacgaaagaaaagccgtttcgaactctgaaacaggcagcaaaaaaggctgtccccggcacaactgtcatgattcgggaaggcacgtatcatgaaacgcttgatgtgagagagagcgggtcggctgaaaagcctatcacatttcaaaactatgagaatgaaaaagtcgtcatcagcggagaatctgttaaggacgcggaatatgaaacaccgctcattcagattcacaatcaacagtacatcacaatcagcggactgacgattcaagacctttccgtttcatcagaagaagcaacagccatgggaatttatgtgtcaggctccagcagtcatattaccatcaaaaacaatcacgtccgggatataaaaacaacagcggatgatggcaatgcccacgggattgccgtttatggctccggcagcatgaaagacattaagatcgaggacaatacggttgaaaagctgacactcggagcgagtgaagcggttgtgctgaacggaaacattgacggtttcacggtgagaggcaatgtggttcgcgacaataacaacatcggaattgatctgatcggatatgaaggaacggccgctcaaaacgattttgtgcgaaacggtatcgtagaaaacaacacggtttacgataactccacttacggaaatcctgcctatggtgatgactattctgcgggcggaatatatgttgacggaggacaaagcattgacattaaggaaaatacggtctacggcaacgatatcggaattgaagcaacgtctgaacataaagggaaatatgctgatgatattcaaataaccgacaacaaagtgtatgagaatgcgtatacgggcatttctatcggcggatacgaccaaaagcggggaggcaccagccattctgtcattgcacacaatattatttaccgcaatgatacaaaggggctggatggcggacagcttttgctccagtatgatacaaaaaacaatacaatcgaaaaaaacatcataacagcaagcgattcgcgaatatttatcgcaaacgattttacgaaaaatgaaggaaataaagtgaatcataacgtgtaccacaaggaatccggcaaagacggactatggatttggaaacagaatgaatacgactcgttttcgccgtatcaaaacgcaacaaatcaagatcaagactcgatttatgccgatccgatgtatcgcgacgagtcatctcatgactttacattagatcctgattcaccggcttggtctgtgattgagtaaagtgcgaaacaccgaacatgctaaaagaattccccataccccaaagctgctttcacagcgtagctttggggatttttaaactgcaaaattaatctatggattgccttctgaatacagccaaaagagcggatgaatgttagaaagatacccgttcactaatttctttaatgtcaaacaagagaagattttttctcactagttgaccccgaatcattgtttcatgtgatagccttttcagctacctgaaaatctggagttcccttttatgaatgttgtacgtagatcgggcttcggttgtttctttccttttgatcctgcagaagtgtggaaaaaagtatgaaaaacttgacattgcctaaatataaaagctatcatggataagtaaagtctatgattgaggtgaaaaactgcgctatgaagtattcgaaagcaacgaactatgcccttcacactatgctctttcttgcagcaggcgccccaaatacatttgtcggtgtacagcagttggcagaacggcaagaggtatcgcccacgtatttatcgaaaattttaacgaagctggccaaggcgggaatgattgaatccgcttcaggcgccaatggcggatataggctaaagcggaattgggaagacatttcgtttcttgatattattcacgcaattgaaggtacagcctccttgttcgattgcaacttgaaccatggatcagaatgtgtgattcagaaggtgatggtatctgcagaagatgaaatggagaattatttgagacaacaaaaaatatctgaccttgccaaaaaaataactgttgagttgtgaaccgcagttatttttttaagactatcaaagatataaagtgtctttaaagtctgttaagccttaatcattgattttacagcaaaaaatgaaaggagttatggatcttgataaacgaattttttaaagaaaccgtttgggaagaagcttggaaggaagatcagcagacagcggttaacaaaatgaaaaaagccggaatggataaagtacaccattttgaccttagagcaaagtcattcaatgagcaagcgtttaacgaagaagggaggaaaaggacaaaacggattatgaaatggctggaagggcagggggtgacatttaaagatacctctattttagatattggagcagcctcgggcggatttacagtgccatttgcagagagaggggccgaagttaccgccgtggagcctagtcttcctttagtcgagctgatgaaagaaaatataacaggaataacaaacgggaaggttaagattgtagctgagcctttcgaagacatagatatccaagcaaagggatggggaaatgcttttgattttgtatttgtctccatgtgcccggctattgctgattgggagagcgtaaagagggtgctgagctgcgcacggcagttttgctatatcagtctgtcagccggctctcgggagcacagtcttctgaatgagatttggccgctggtttcagatcagccccttaaaaatgaacattcggagatggcctatttgctccatttattgtttctaaaaggttatacctatgaatcactcgtaacccgggaaatgaaaacgagggaggtatccagggaaacggcgctcaatgaggttatggacatgttgagaatgtttggtttgcctgcggacgatcgcaaccggaaaatcaccgccgcttatttggaacggacttatccaaacgacaaggtggaaatccgacagggcggccgttttggaaaagttctgatccgattacagaatcagaacatgtacatgaattcatgacgacacagcaattaattatagatattaaagatctatggaggttcttaaatacatgaaaaaacaacttctcgatgtagcgattattgggggaggtccagcagggttgaatgccgcccttgttcttgggcgtgcgaggaaaaatgtggcggtgatcgatgcaggccggccacgcaacgccgttactcgcaaagctcacggatttcttacccgtgacggaataagcccaagtgaatttcggcaaattgcaaaggaacagatcagtgcatatccctccgtgtcttttatagcggataaagctgtgtcgattacaaaaaccggcggtcattttcaaatgacaactgcgcaaggaaacacttttgcaagcaagaaagtgctgtttgccgtcggaatgaaggatcagccgctagatattccagggctggcagaggtttatgggaagagcgccttcgtctgcccgtactgtgatggctgggaattaagggataagcctctagtgatcattaccaagggggacgaggccattcacttcgcttctctcatatcaggatggacgaaccgttttacgatttgcacgaacggcccccatcaactgacggacgagcagtgcgaggagctcagcaggcatcgcgtccctgtattcgaagcgccgattcgatgcatcgactcagacgacgggatcgtgcaacaagtcgttctcgaagacgggacgacaattccatgtaagggaatcttttttaaaacggaacttgtgacaggatcggatttaccgcgagccataggatgcgacatcacagaatcgggaacggtcgtcgttgataactttgggaaaacgaatataccgggcatctatagtgcaggcgatgcagctacgaaattgcatcaagccgttgtcgccgcctcgatgggtgctatggccgccgcggccataaacaatgaactgaatttggaggcttgggagcaaaacggatgaaaactttctgatactcaaatgtccaaaattaaaagagccatactttaagtcagaagaaaataggggtgtatgttgacatatgtagaggtgaaatgcctggtagctgtttttttattcgtcatttgataaaccgttctgtgaacaataaactaaagttatcgattaacagttcgttgaaaaacttggtgtcatatgttcaaaaaaaccctaatttaatggggtttttttattttcggtaatacacttctgttgtacaaggaagtaaacatagatccattttatgcgttgtaaacactagtcaaataagtattttatcatttaatggatccactcttatgttctctttacagaaagtaaaagtggatccattattatttgggaaagtaaaactggatccattctgaacgactgatgcactattactgagatattatgaatattcatagaagggtattgtagaaccttgtcgaaattttatagaaaaatcttgttaaaagaggtgtgcacatatattcacccattaacattaaaagaagcagcaagtttggaaataattattgggaatcatatatctgaaattgttagcgatctcaagaaagccaaggagtagatatgattcactgaagataggatgtaatagtttcacagttttgaaaagcgcttatagcgcaatgtatgtatttcacattcgccacttttattaattaagggggaataagaaaatgaaaacttatgacgcatttccagaaccaattggcggctatactgtcggtcgaacccagatggattttgagtacacggcatcagatcactcaaaaagagaactgacggcgtttgtgtactatccgtccgacagtagcgaaggtaagactacatcaacgtacatgtttcctgaagtctacgagatgtttaatgagcagccacttgtcactgcgttgaaggatgttttctctatagatatcaagacccagtgttacgacgaccttgctctctccgggaaggaaaagcgctatccggtattattctatgtttgcggcgggggcggttctccagaatggggtacagtgatctgtacagacttggcaagcatgggatatgttgtggtaagcatcggccatcagaatagcacgatgtataagcgtaaagatgggcgcctgtttaatgtatcaaaggatttttcggatgtcattatggcgttttctgaagatccggagatgctggcgttggctggtaagatggagatgcggcctgacgatgaaactgccattgagatgtgccataacgtgcttacactgccgatacttgccaagttaacagagtatagtgagttacaggcagaagatgtaaggtatgtagccgattatctttacaaactggactctggagaactgaattccatctttaagggcagattgttgcttgacatcggcatgggcatagtcggacattcttatggagggcctacgacggcgattgtttgccgggacgacgaccggttcgcctgcgggattggcttggatagcggtgcgttcggccttctcgacagcgaccttaagaaacccttcttgctactgttttgtgaacctaactataacatgaatgcgataattggcgctaacaatagcatggaaacctattatttctctgttgatcgtgttgcgcatttagattactgcgacatcgtgtttaccagtgttaatgaggaactcagaggtgaacgggatgctatggagatgcgaaatcttgttacagactatacgaagaacttttttgatcattacatactgctgaaggctgcaagtgtggaaagtctggcatacgatggcgtggacttgatcaagaagaccagcaacaagtgacataaccgagaggttgctgataaacgcatgtcaaagagttagccgtacagacacaaagccgataaccctattacgcggttatcggctctctcatatttcaggcattgttttctatttgagatgataagcggtgttttcaccgttgaagatgttagaaattggctggattctagaacagatcataccaaatgaatttatactatattgacatatagatattgagatgagttttgatttgatagggagaatcgcgcccaattaaaactaaatgaatatgcaagcaaagaagtgtttattcccttcaaaattacaattcttttgtacaaagatgatcacaagaagagatcaatttttataagttaaaggagaaggagtttgagaagaatgggttatgtcaaagaaccgtcgtacaggaggaacattgtataatcctaaccttcatttctttctagtttacataatatatattctcggaagttaaggattaaaaagaaattctgtctcaatctcaaagtatactcaagttagtgagacagaataaaaatttagcgatacactgaatatacggcaatttcttttccccatttatgtattgttttttctaaagtcatgccgattcgttcggctacttttctggacggcagattttgcgcatcaggtaaagatacgatttttttcagatgaaatgactcaaatccatattgtttgcatgctgatgctgcttcggttgcatagccgtttttccagacgctccgtttaaacaaatagccgatttccatttcgttcgatccttcgacttcctgtggcacgatgccgcattggcctaaaaattcgcccgtttgtttatgttcggcaacccacagaccggttccgtgtttttcatagttttcaagcgtccggtcgatccattgcaatgtctgtttttcattctttgtcgatggataatattccattgctatcgggtcagaaaagatttcgagcaggttttcggcgtcatcgcgcctcatttttcgcaaaataagccggtctgtcttcatgatcatgtctttcatgcttctcctcccccttattttattgattatggagacgttaattcccgataaaccgtttctaattcttccaccgtcagatctccgtatgcgcatttaatcacggcatctgcgaattcatcatagtcatcatctgttgaaaagccttgctgaagcgttttggcgtaaagctcgatttgttcctttctcttttcaatgtcttcctccttgcctgtgtaatccggtccattgatcgtgtcatagtgttccttgacaagcatcatgtattgctgcaatgtttcattcatacatccatctcctttcatgtttacaaaaatattcctcattccttccattataatatatacgaaaacggacaccatatccggtgtccgtcaaagtgccgttatttaggttcagtgccccaaatcagctttccgttctcatacaacgtgatttttttcgtatttttaaacgtgtttgaattaaaaaatgaatagtcgccgctttgggcataattgctccagccgtcattgtgaagacggatctggatttcgccagtatcagcccccggcgccaatgtaccatttttaaatcctacttcaagatacgtgtctgctccgtttaccgctttttttaattgaacgaatttgtgcgtgattttgctgcagccgatttgggcatagtcgcagtcaaaattttgtcctttgcgattcgttttataccagtagcggacagtgattcgatttaaagacacggtttttttgctgttgtttttaatgttgagctgagggcggatttggttgccgtttacattgttgtcccccgctctgtattgtactgctatcgtgttggctgcagcgccgctgtcttgacctggtttatcctgatcctttttttggtctttttgatctgaccctttcgaattcgatccagagtctcctgacgaaccgtttgacccgctgcggatgttatccctgacgaatttgcctgatggggacaagtcggattgcgaccatcctccgtttttagaggcgcctgggtttaaagctgctgacgactcttgtttgtcggataagttccagtttacccagctgatttttttgctgtctaaatatttcagccactccctggattggtcaaggtagaccccgccgtttcctgaagcatcgctcgttccccattctgtgacgaaaatcggcgctcctttgctgagtgcataatcggctttatcccgcaaagactgaccgtgcgtgcccgcataaaaatggagcgcgtacatgacattgccgtctttcagctgattgtccgccgcatcattgacatcctggctccaggtgcctgttccgacaatcacaatatttttcggagagtttttgcgaatcacggacaggatttcttcggcgtaaggtttaatgtcgcgattccagttgacatcgccgttcggctcgttggcaatttcaaaaatgacgtttggcgtcttgccataaagtcttgacatttcgttaaaaaattcttttgctttcgctttgttttggtttggattgccatcgctcagtatgtgccagtcaatgatcacatagattccgagttcttttgccgcttcgacggcttccttcactttgtttttaaccgacggattgtcaatatagccgccttcagctgtatacatggccgcgcggaagacattgatgccccagtcgtctctcagccattttaacgagtctttgttgacataatcgccataccactgtagaccgtgggagctgattcctttcagctgaaccgcttttccgttttgattgacgagctgcgtaccttttaaggtaagctgtccgtttacagcaacgggtgttttagaagcggcagccgctttcggtgcaatgataccgctgatgccaagcgccgctaccataaaacaggcgatgaagacagagatggaacgtttcatatatgacattctttttcctccaatgattttatttttcgaaaatactttttccgcagccatttttcactcctttccttgcctgtagcacgaactgattgtaaataaactattcaccgattgtctatcaaccatatttcttgttttttggcgcttaaaaaatctatctatttcctcttttcgtataaaatgggaggtctgaatactagtgaccgcaagcttttaaaacaaatggccggggactttgcacatcctttttctctcaattctaaattttaaaaactgaaatctttacaatgagatgcttcctctctgcctaaaatgccgcatccgggaaaaatcgctgtgaaaagttcataaaactgacacgttctctctgctgtttgtatcactttattgacaaaaaaataaaaccatccgcttggaatggtttacttctttaaatcggagaaaaagccgacaagttttgtggcgacaccgacaaacgtttcaagaatcgcctgccccccggcgaccgacaaaatcaaaatcaacgggaatatcgcttttggggcaatcagatatccgacagcaatgatcaacgcgcaccatatccctgcgcaccaatagcaattcagcaaatagccgaagtttgatttcggcacttttttcgtttctacatgcccttgttcatcaatcgtctgcttcttcttcatgaacggtttccggataaactccgtgatcttatcaaaaacaatcaaatgagttaaccggtaactggcgagaatcagcatcgtaaatgtaagccaggatatatgctccattgcgggcctccaacatgaaaagttatctatagctatttcccgatttcttctgacttattgctttttctgtcattttttcagaatgtgatgtagatcacgattttccctcggtgaacccgttacatttaacctatagcatacaaaacacttcaggaggttttacaaatggaagcagtttttgatcaaaatacaaaaacgggtgatattgttacacgttttccaagagccagccggctgctgaaagaatatcgcatcgacttttgctgcgggggcaaccgcccgatcggtgaagcgataaaagagcaggatttaaatgaagaagagatcttagctagaatcaatacattatatcaagagacaaaggcattaaacgcaaaagagacgaactggagtgaagccccgtattcacagctgatcgaccatgtgattcatacgcaccatgcctacctgtatgaggtgcttcctgaactgtcaggctttgttacaaaagtataccgggttcatggcatccatcatccggagctcgcccaggtccatcaattgttccatcagctgaaaacagaactcgaacatcacctcttccaggaagaggaacatattttcccgaaagtgatggcctatgaagagacgcgatcaatggaccgcttagcagaagcggttcagacgatcgacgtccttgaacaagagcatgaagccgcaggcagcatcctgaaggaactgagaagagtgaccaatgactatacccttcctgaaggggcatgcacaacatatacactgacttacttaaagcttgatgaattggaaacggatctttttcagcacattcacctggaaaacaatattttgttcccgcggcttgaagcggaagccaatcaataaaacaaaaagacagaggattttacttcctctgtctttttgtttatctattcatctgaagcaatgtctttaacaggcagcgcttctccttcccgatgcgtcggtttgcggagatggaataatgctctgatgctgaatacaaccaaaatcacgattccggctaaaaagatcgtatccggcacggccctccaagtcagcagcgtttgcactgcatcctgctgtaaaaactcaggcgcccttgagctccagtacccgtcttcaaacgcttttttcaattgaagaaaaccgaccggcagcaaattgataaacaccattccgaacaggccgatgttcagcgaccagcaggctattttcagccatttatcattccatgcttcttttttggcgatattgcggagcgtatacagccagacggcaatggcaaacatgccgtacacacccatcatcgccccgtgtccgtgggcgggtgtcaagaactgcccgtgctcaaaatagctgacggcaggcaagttgatcaaaaagcccaataccccggcgccgaccagattccagatcgccgttgaaatcaggaaccagaacgttgctttatacgggaagtgatgtccgccgtctttcatcatcttgtattgttcgtaagcttccaatacaagcagggtaagcgggatgacttccaggcatgagaagacggaaccgaggccgatccagacttcggaagacccgttgtaatagtaatggtgtccgatcccgatgacaccgctccccagcaggatcgtcaattgaaaatagagcgttctgacagtcgactttttcgtcaccaggttcatttgcacgagcaaaaagccgatgaccacgacggcaaagacttcaaaaatcccttccacccaaagatggatgatccaccaccgccaaaaatccgacattgtaatattagtgccgggattaaagaaaaaggcagcaccgtaaaacagcggaatggcgatcgaagaataaaacagcagatgaatcaaaccgcctttatcaggctcccgcttgaggccgctcttaatgcctctgaagacgataaacagccaaatcagcatgccgagcgcaagaatgacctgccaaaagcggccgagttcaatatattccattccttgatggccgaataagaaccagttgtttcctaaaaagcctttcgctccgagccattcgccgaccatgcttccgccgacaaggacgatcagcgcccaaaacagaatgtcgacaagcagcccctgtcttttcggctcgcggcctccgacaagcggcgccgcataaatacccatcccgagccatgaagttgcaatccagaagatcgccagctgaaggtgaaatcccttagatatgctgaagggcaacagctccctgatccaatcaatcccaaaaaagctgtccggttcaatataatagtgggcgagcaaagccccgaacatcgcctgaacaaaaaacagcagcgacacaacggcgaaatattttccggttttaacctgtgaagcggtgagcggctgtttatccagatcaaataccggaaacgccccttcctggtaagcctctttcattccaagcttgtaacggtaaaacacgaataaaataatgccgacaaataaaatgaggatggtaacgcttgcgccgctccaccaaacggcggcgaatgacatcgtgttgcccgcatcttcatcatacggccagttgttcgtgtacgtaatgtcgtcgcccggccttaatgtactggaaagccatgccgtccaaaagataaaatcggagacctgcgtgatttggtcttcgctgtcgacccacgccctgttgcgttcaggcatgtggctttctttaattaaaccgggctcaagcccccagccgtctccttttgtaaagactttgcggtaatgatcgcgcacttgatgcaagccgtagacctgcgcgtctgtcagcttcaatgtatctgatgggcgatcataacggttttttctcatttcgcggatgacgtgattccggatggtggactgcttttcatctgaaagttgtttaaagcgcttgccgtattgtgcctccgccttaaaatcctgcatcccttccgtatagattttcagggcttcggccgtgtaatcaggccccatataagatccgtgccccaaaatcgttccatagtccatcagcgcgtatttttgaaatacggcctgaccgcctgaaatagacgattttgtcatgagcacctctccgtttggcccggacacttcaacaggtcttggtgcaagtcctttgaagatccaatagcctcccaaaagcagcaccgaaaaacttacgattaaagtaaagacgagaatggatttcagaaaaccgttttttgatgcttttttaacgggcaccgtctttctttgtacttccattgcggttcactccttttttgattttgcatgtcctaagatactggatatgcaaaacaccagttgtgaaccagatcacttaaatcatggcgtatttgtgaacaaaataaaaaacaggctttccatctgccgttcaatggaaagcctaaaactcatgccttaattgcagccgttcagccagtctgtatcatgaatgaaaattccgctcctgtcagctgtcagcagatttttctttttcaattcatttaatgtgcggttaatcgtttcccttgacgttccgaccatgttcgcaaaatcctgattggtaatgggcaggctgatgtagacccctttttcttgaggaatgccatgttcagcagcaagcttcattaatacatgtgtcaagcggtgctggacgtcttttgagataaaaccctggatccgctcttgcaaatcgagaatctttttccccatgatttgcatcacttttatcgtcatttccggaaatttcatcaaaagttcattaaaatcggcgatgcggattacgatcaattcggtttcttgaacggcttctgccgttgccgggtatggggagaggtcaaaaaagccgacatggggaaacatatccccgttttgcagaatcgaaatcacttgttcattgccgtcttcatcgattttaaaggctttaacaagaccggatttgatgaaaaataccgcttccctctcttccccctccataaaaacaaacattctcggctgataggtgcgcttggccgcgatctgctcgatttgcttgaactcttcatcattcaacccgctgaaaatcataaattgcttcagaaactccattggtctttcaatcccttcggttttgctaaaggagagcggtttgtcacagacggcgctccagtgcaaagagctcttcttcaatcgccgctgccttctcttccaccactctgcggctgtccttcaaggcctgattgtaaaagtaaggtccgagcttttcctttacgaattcgaacatttgaatcgccgcaatgtctccgacctcttctcctctttcttcaacataaaagcgtttgatttcatcgatgatcgcttgtttttcttcttgggtaagctttataaacataaaagcggcactcctttttttatttccatgataaacgataaagtccgcaaatgaacaatttatttttttacatccgtttactctccgtcacttaccgatattaaacacgaaacaagcgaatgaccgtgtgacgtaattcacaatgttttaaaaagactttttgtaagataaacatgctgattgatttattcatttttccctttgaaaggagcaaaaccgcaatggcaaatcgtcaaaaaatacaattaccgctgcagtcatttagtttagtcgcaggatttatggtttgggtattgatttcctctttaatgccccacattaagcaggacatcgccctgacagacagcgaggtctcccttgttacggccattccggtcatactcgggtcgcttctcaggattccgctgggctactacacgaacagatttggagcaagaattacattcatgatcagctttttgctgcttctgttcccggttttttggatcagcacagccgattcgctgttcgacttgatccttggcggcttcttcctcggcatcggcggagcggtcttttccatcggggtcacatcactgccgaaatactaccctaaagaaaagcacgggtttgtcaatgggatctacggcgctgggaacgtcggtacagcgattactacgtttgccgctcctgttgtcgcaaaaaccgccgggtgggaaaatacggtgcggatgtacatcgtgttagtcgccgtattcgctttattgaactttatccttggagatcgaaaagaaacaaaagttacggtatctgtaacagagcaaatgaaggcagtctaccgaaatcagacattatggtttttaagcttgttttacttcattacattcggatctttcgtcgcgtttacgatttatcttccgaactttcttgttaatcacttcgggcttgatcccgtcgattcagggctgagaaccgccggatttatcgctgtcgccacttttctgaggcctgtcggcggctggctggcagacaaattcaacccgctgaagctgttgatgtatgtatttgccggctgcaccttgtcagggattttattggccttttcgccgagcctcggactgtacgggtttggggtattaaccgttgccgtgtgcgccggactcggaaacgggatcatctttaagctcgtgccgctttatttttcaaatcaggccggcatcgttaatgggatcgtatcagcgatgggcggcttgggaggatttttcccgcctctcatcctgtcaagcgtttttcaggcaaccggccattatgcgatcggattcatggcgctgtcagaagcggctcttgcaagctttgtgatcgtggtctggatgtattttcaggaagtgaacaaaacatcgtccaaaacgaaggccaaccatttataagcccttcctgcaaaaagagattgagccgatatgcccaggctctttttcgggactatattcatatgttcacaatattgtttatatttaaaaggtcactctgccttatttaacgttaaaataagaactgcaaaaggggtgacgctcaatgaacatttctgttagaaaatcagacacagatttgctctcagacgatctgcatcacttgctggaatcgatcagtacgcgacgaaaaatcaggcaggacacattcctttttcaagaagggatggatgcagaggaactgtatcttattcagtcaggacttgtccagatcggcaaattgacgtccgatggcaaagaactgacgcttagaatgtgcaaaaaaaatgatattgtcggggagcttacgctttttacagaagatgcgaaatatatgctgagcgcaaagatcctctctgatggcgaagtgttggtcatcaataaagataagcttgaaaaagaactcattcaaaacggtgcgctgacgtttgagtttatgaaatggatgagcacgcatttgcgaaagattcaatcgaagatccgcgaccttttgctgaatggtaaaaaaggcgcgctctactccaccttgatccgtctcgcaaacagctacggcatcacaagaagcgacgggattctcatcaatattgtcctgacgaaccaggatctggcgaaattttgtgctgctgcaagagaaagcatcaaccgcatgctgagcgacctccggaagaacggtgtcatttcaattgaggactcgggaaaaatcgtcatccaccagatcaattatttaaaacgcgaaatcgactgtgaaaactgcccgctcgaaatctgcaatatcgactgaaaaagcgaaaacaaacaaggacatgaagcacagtgtccttgttttttacgtttgcagcagaaaaacgatcaacacggccataaagatacaggcattcaccagctcagagattccgattatcttaatcgacagtttcctcccgtggaaaaaccacgctctaagactgctcggcactacgccgatcaccgcccatcctgcccctgcggccagcgagacgaacggcaggaaaacatggtagccccatgaataaagcttgaatcgattgtttttcttttcacgtatcatcgacttgacataaaaagcgctccctgtgaaaaacaaagcggactggataaaaacaaacgatgcctcaccatcaagcttccccgctcccatccagaagctcgcaagcccgcccgtgctgaaaacaaggattgcagctatatcatttaaaagcgccctgtcgttgtttcttttcgcataataaagattgatgagaaagagcggaaacagcggcagaccgagatacacaagctgcggctccagcaggaccgaaataagcaggaaaacgacggccggaatgccgtagatgagaacccatttttgatagtaaacgatatttttcttcttcaccatcatcatagccggagatgccgcaagatatagaaacagccatccgcagaacagcggaatatgctttacatctgcgcctccggcgaacatgccgagaataaacgggatgacaagcatcgcccaggcgccgtgctgcttcggtatgaacactttcatcacacatcctcccttcttttctattacattataaaagtttcgttctttttacacagtgacattttgcatacagtcgtgtgaattaaatcactgcgccctgcagcccggcgctttatactaaaagccaatatagagaaggaggatataccatggaccggtttgactacttattgtttctgaaaaatcttcctatgtttttcggagtaccccttccgatcatcaaaaagctgctgaagaacggtaaggtgatagatatccaaccgtctcagcattcgcgatcgttccttcattcgcaatccgtctattttgttttaaaaggagaagtgcatttttccgacagaaggcttccggaagaatcacggacgatcgccgagtgggaaaaaggcgatgtttttcctattgatcaaaaaggcgaacctttcttatctccgtttatttcagtcaatactgcctctgaaaccgccgtacttgaaataccgtttcataatttcaaaaaaatgatgacttataaccgccaattacagacgaactttctcatgttgctccagcagaatttatttttttcataccagctttttttgcgctacctcaactcctccgcagaagacgacgtgtgagaagggcctctccccttctttctcttcttttttccaaatgtgatctacttaactttttttctcctgcatttccgctacgatacacatgaatgcaaacgaaaggacagatgaaagatgatactttgcgatttcgacaagtctccgtttatcgtcatttgggagctgacaagggcttgcgagctcaagtgccttcattgccgggcatcggctcaaaataaacgcgatcctcgggagctatccctgaaagagggaaaagatttaatcgatcaaattcatgcgatggacaatcccctcctcgtgcttacaggaggcgatcctttaatgagagacgacgtattcgccattattgaatatgccgtccaaaaaggggttcgcgtctccatgaccccgagtgccacgccgaatgttacaagagaagcgattcaatcagcaaaagaaatcgggttatcccgatgggcgttcagcttggacggcccgacccgggagattcatgatcattttcggggaacggacgggtcttttgacctgactatgaaggccattcgctacattcatgaatgtcagctgcctctgcagattaataccgtcatatcctcctataacatcgattacctggatgaaatggcaaagctgatcaaagaattgaactgcgtactatggagtgtgttttttctcgtcccgacaggccgcgcgaagcgggaagatatgatttccccggtggaccatgaaaaagtctttctctggctcagccgtttggcaaaagaagcgccttttgacatcaaaacgacagcagcccagcactaccggcgggtcgtcattcagcaaaaaatgcgggaagcgaaagacccccacatgaaaatccgctatgaacacgcattgcagaaaggaaaaatggatgccatcggcggattgggccgggctccgaaaggtgtgaacgatggcaacgggttcatgtttatctcccatatcggtgatgtatatccaagcggactcctgccggttaaagccggaaacatccgcgaacagccgctggctgagatttaccgcgaatcaccgatctttaaggatcttcgaaatccggacggatttaaagggaaatgcggcgtctgtgaattccgtcatgtgtgcggcggttcgcgctcgcgtgcttatgctctgacaggcgattacctagaaagcgatccgagctgcatttatattccgaaggctttgcgctaaaaaaatgtgatgtacgtcacatttttttcagcttccttgtattacggtatagatgagaatgatcatcactatcaaaggatgtgatcccttgcataaaaaaattgatttggacgattccgtttacaaactttgcacattgcatcctgaactaaaagccgtgatgaaggatgccgggtttcaaaatattacaaagcccggcatgctggaaacagccgggcgcatcatgacgattccaaaaggcgcgcgaatgatgcaaatcgaatggaaccatgtcttagacatattgaaagcacacggatttgaccccgtttggaaaggagaaaaacaatgagcgaaatcattaacaatcgggaaacgcagcaaggtctgcctgaggaaaaaaagcagcttctgaaggagatcatcatcgaccttcataaaggaaagccgcttgccgacgtcaaaaaacggttcgaaaaggcattcggctcagtcaatgccgaagaaatcgcccagctggaacaggcgttgatgaaggaagaaggcattacacctgaagagatccaagagctctgctccgttcacgccgctgtgtttaaaggatcgattgaagacattcaccgcgcggacgccgacaagcagcctggccatcccgttcatacatttatgaaagaaaataaagaaatcgacctccttttgaactttaaaatgcagcttcatttggaacgctttgaaaaagaagatcatcgcgacaacattctcaaactgctcgcagacttaaatttgctagctgacgtcgacaaacattacagcagaaaagaaaatcttctgttcccctatttagaaaagtacggaattacagggccaagccaagtcatgtgggctgtcgacgattttatccgcaagagcattaaagaagtgaagcgtttgttggaagagtatacgccggacaaaaaagatgaggtcatccgcgaactaacgtttatcattcaagaaggcacggaaatgatttataaagaagaaaatatcctcttgccgatggcgctcagaacgctgacagaagacgaatggctgaaaatcgcagccgaaagcgacgagatcggatattgcctgactgctccggaaacggtgtggaagcctgaacgccatcagatcaaaacgagcgaagaggcggctgatggctatgtcagactccctaccggtattctgtctgtggatcagcttgaacacatgatgaaccatcttccggtcgatatcaccttcatcgatgaaaacgatgtggtccgctatttttcacacggaaaggaacggattttcgcccggacaaaagccgtaatcggccgaaccgtccaaaactgccatccgccggctagcgtccacatcgtcaacaaacttctggacgactttaaatctggcaaaaaagatgttgaagatttttggatcaaatttaaagacaaatacgtgttcatccgctattttgccgtacgcgatgaaaacggccgctatatcggcactttggaattcacccagaacatcgccccgattcaggagattaacggggaaaagagaattttgaacacgagcgattgaaccattcgacagcccgcttccatgcaggctgtttttttgtccgccctcttccccctcctgaaaatgtgacaaatttgtgaaaagccgaaaccatgtgacaaatttaacaaggtgcagcgcctcctccatatatagtgagggtagcatcactgactcagaaggagtgaaccagcaatgaaaaaaaagaaaaagagtcccattttcaggagattaaattatttctcccctattgaacgccattccaatcaacacagccaaaccacttatgaagaccgggattgggaagatgtatacagaaatagatggcagcatgataaagtggttcgctctacccatggggtgaactgtacaggatcctgcagctggaatatctacgtcaaaaacgggatcgtcacatgggaagggcagcggcttgattacccttcgacaggccctgatatgccggactttgaaccgcgcggctgtccgcggggagccagcttttcctggtatatatacagcccgctccgcgtgaaatacccgtatgtacgcggtgtgctgatccagatgtggcgcgaggcgctaaacagcagcaaaaatccgcttgaagcatggaaatcaattgtcgaaaaccctgaaaaagcgaaagcctataaacaggcgcgcggaaaaggcggatttgtccgcgccgaatggagcgaagtcctgaagctgatttcggcttcccttctgtataccattgccaaatacggccctgaccgcaatgtcggcttttcgccgattccagccatgtcgatgctcagccatgcagcaggatcacgctttatgtccctgatcggcgggccgatgctgagcttctatgactggtatgccgacctccctcctgcttcaccgcaaatttggggagatcaaaccgacgttccggaaagcagcgactggtacaattctggctacatcatgacatggggctctaatgtcccgcttaccagaacgcctgacgctcactttttagccgaagcccgctataaaggagcaaaagtgatttcgatcagcccggactttgccgagtcctcaaagttttccgatgattggctgagcatcaaacaaggcacggacggcgcactggccatggcgatgggccacgttattctgcaagacttttatgtcaaccagaaaacggaacgttttattgattatgcaaaacaatataccgatttcccgtttttggtgactttgaaagaggaaaacggaacgttcacagcaggccgcttcctccatgctaaagatatcgggcgcgcgacagagcacgttgagtggaagcctgccgtttgggacgaagacacagatggatttgcgattccgcagggcacgatgggctcccgctgggacggcaaaggaaaatggaacctgcgcatggttgatgaggattcagaaaaaccgatcacacctcggctttccatgcttggatacgaagatatgatcggcacggtcaacatcccgtatttctcacatgacggcaataaagtgcttgaaagaccgcttccgatcaaaaaagtcatcttgaacggcgaggaagtctttgtttccaccgttttcgacctgactctcgccaactatggcgtcaaccgcggaatcggcggacagacgccggcatcatttgatgatcctgaaccgtttacaccggcttggcaagagccgattactggcattaaaagtgaaatggtgatcaagatcgcgagggaattcgcgcaaaatgcgattgacacagagggccgctcgatgatcattgtcggcgccggaattaaccattggttcaattcagacaccatttacagagctgtactgaaccttgtgcttctcgtcggagcccaaggagttaacggaggaggctgggctcactatgtcggccaggaaaaactccggccggccgaaggatggcagacgatcgcgatggccaaggactggggaggccctgccaaactgcaaaacggcacatcatttttctacttcgccaccgaccagtggcgctatgaagatcaggaaatcagcgggctcgcttcaccaatcgcaaaaacatcgcgctacaagcaccatgccgattacaatgtgctggcggcgagactcggctggcttccatcgtatccgacgtttgagaaaaacggcatcgacttgtataaagaagcagaaaaagcgggcgctgagaacgctcagcaagtcggaatctatattgccagacagctcgaggagaaaaagctcaagttttcgattgaagatcctgacaatgaaaagaacttcccgagaaatctatttgtctggagagccaatttaatctcaagctccggcaaaggccatgaatattttctgaaacacttgctcggcacgacaaacggactgatgaacgatgatcaggacagcatccgtccggaagaaatcacttggcgtgacaaagcgcctgaaggcaaactcgatttactgatcaatctcgatttccggatggcgggaacagccctttattcagacatcgtgctccctgcggccacctggtacgaaaaacacgatctcagcagcacggatatgcatccgttcatccacccgtttaatccggcaatcagcgcgccgtgggaagcaaagtctgattgggatatttttaaagcactggcaaaagcggtttccgatctggctgaagaagtggatatggaacctgtcaaagaggctgttgcgactcctcttctccatgacactccacaagaaatggcgcagccgctcgggaaaatcaaagattggagcaaaggcgactgccctgccgtaccaggcaaaacaatgccgcaaattcacgttgtggagcgggattataagcagattttcaataagatgacatcgcttgggccgaatgttgtcaaacagccgtttggtacgaaaggaatgaactggtctgttgaagcggaatataattctctcaaaaaaacgctcggcgtcgtaaaagacgacacgatcgccaagggctgtcccgacatcagtgatgctagacaagctgctgaagcggtattgactctctcttccacttcaaacgggaaagtagccgttaaagcgtgggaatcgcttgaaaaaattacgaatcttgagttgaaagatttagctgaagaacgggaagaggaatgcttcacatttgagcaaatttcagctcagccgaaaacggtgatcacctcccctgctttcagcggttctgaaaaaggcggacgacgctattctccgtttacgacaaacgttgaaaaactgattccgtggagaacgctgaccggcagacagtctttttaccttgatcatgaaatgatgacagaattcggcgaaaacatggcgacattcaagccgatcctgatccaccgccctttcttgaacaagcgtccggatcaggaaggaaaagaaatcgttttaaactacttaacgccgcataataaatggtcggttcacagcatgtattttgattccctgccgatgcttacccttttcagaggcgggccgacagtctggatgaataaagacgatgccgaagaaaccgacattcaggacaacgactggatcgagtgcttcaaccgaaacggtgtcgtcgtcgcacgggccgtgacatcacaccggattccaaagggaatggcgtttatgcaccatgcccaagacagacatatcaacgtgccgggaacaaagctgacgaataaccgcggaggaacccataacagcccgacccgcatccatgtcaagccgacgcagatgatcggaggctacggacagctcagctacggattcaactactacgggccgacaggaaatcagcgcgacctcaatgtcgtgatcagaaaattgaaggaggtcgattggcttgaagattaaagcgcaaatcggaatggtaatgaaccttgacaaatgcatcggctgccatacatgcagcgtcacatgcaaaaacacttggacaaaccgttccggtgcagaatatatgtacttcaacaacgtcgaaacaaaaccgggcatcggctaccctaaacaatgggagaaccaggataaatacaaaggcggctgggagctgaaaaaaggcaagctccagcttaaatcaggcgccaaagcaacgcggctcatgaatttattctacaacccgtatcagccgacgatcgctgactactatgaaccttggaactatgattatgaaacgctgacaaacagtccggagaaaaaacatcagcctgttgcaaggccgaagtcttccattacgggagacttcatgaaccttgaatggggtccgaactgggaagacgatcttgccggcggccacattacaggcctccaagatccaaacgtcaaaaaaatggaagaatccatcaaaaccgaatttgaagacgtctttatgatgtatctgccaaggatatgcgaacactgcatcaatccttcctgcgtctcctcctgtccgtcgggagcgatgtacaaacgcgaagaagacggcatcgttctcgtcgatcaaaatgcgtgccgctcatggagacactgtgtatcatcatgtccttataaaaaagtgtatttcaactggcagactaacaaggcggaaaaatgcacattgtgcttccctcgtcttgaagcaggactgccgacaatctgctctgagacatgcgtcggcagaatccgctatctcggagtcatgctttatgacgcagataaagtcgaagaagcggcttcagccgaaaatgaaaaagatttgtatcactcacagctggagattttccttgacccgaatgatcccgctgttgcagaagaagcaaaagctcaaggcattccgctggagtggattgaagcagcgcaaaaatctccgatctacaaaatgatcatcgattggaaaatcgctctgccgctgcatcctgaataccggacattgccgatggtatggtatattcctccgctcagtccgattatgaatatgtttgaaggaaaaggaacagcccaatcagctgaagatatcttccctgctattgatgaaatgcggattccgatcgaatatttggccaatttgctgactgccggtgatacacaccatattagaacgacattaaagaaaatgtctgtgatgcgtatgcacatgcgggcgacccaaacgaacaaacagatcgattcatctctgattcaagataccggattgactgaagagcagattgaagacatgtaccgtctgcttgcaatcgccaaatacgatgaccggttcgtcattcctcaaacccatcgcgaagaagtcgcggatctatacatggaacaaggaagctgcggattatcgtttgccggaggacccggctcttgccaaaacatataaacactggagggaagcttcatggatggaacagacaaacaaaccgtttttgccgctctttcttacctcctctcctaccctgatgaagagtggagaaaagaacgttccgaatggcagcagatcatcggcgaaatcgagcatgaagcgctgaaaggacatctgcttgccttcttggaaagcgcggcttcctattcgtctgaggaattgattgaaacatacgtatatacgtttgatttcggcaaaaaaacaaacctttatgtcacctatttcaactccggcgaacaaagggagcgcggtattgaattgctgcagctgaaagatctgtatcagcagtccggttttcagccgacagataaagagctgccggattatctgccgctcatgcttgaatttgccgcagttgcggatcaagaaaaagctgctgctgttttccaaaaatacgcagcaaacctggaagaattgagatcgcagctttcagagaatgaaagcatctatacaccgttattggacggattaatgctgatcttagaggaaattggtgttgaaaggaatgtacagccatgatcgaacaaatactgtgggtcatcctcccctacattgtcatcaccatttttatcggagggcatatataccgctatcaacatgatcaatttggctggacggccaaatctagcgagatgctcgaaaagaaaaaacttgcgcttggcagcagccttttccactggggaatcttttttgtcatcggcggacatgtgatgggaattttaattccggaaagcctttatgaggcgctcggcgtttcagagcatatgtaccataagatcgcgatcggcttcggactgcctgcaggcatcgccgcgctgtcagggcttctcatattgacctaccgccgattcacggacaaacggattcgaaaaacgagctctgccggcgatttaatcacccttgtcgctttgttattcgtgatgaccactgggcttgcggcaaccttcttaaacatcgattcaaaaggattcgactacaggacaacaatcggcccgtggtttcgcaacattttcttattcaagccggatgccgggcttatggcgagcgtgcccctctggtttaagcttcacatcatcatgggctacgtcattttcatcgtctggccgttcactcggctcgtccacgtattcagcatgccgctaaaatatttgacaagaagctatgttgtttaccggaaacgggcgccccgcaaaagcatgtaaacattttccctaaagctaaaacggctttagggatttttttctccataggcaagctacccatattaccaatcaatcatacgataaagcaaaccatcagaaaggagcgtttttattgtatccatacgatccttcactatatgatccgtatcgccagcaatttccgccggggccgcctccgggagcaggaggacagcagcaacagcagctgctccccccgccgccgagccaatttccgcaagactccggcccttcggtatttgccgttgatcctggcggaatcagaagatgcctgttcagatacacgttcatccgcttgagaaacggcagccgtttttggttctacccggttttcgtcggccgtcgttcgattgcgggctaccgctggaggccgcgtcaattccgctgggtttacttcggtattgacctgaacgagatcacttctttcagctgtcagtaaaaataagaaaaaggcgcccccaaggacgccttttttaatatggtttatttcgattgcaatgtttccttctcgtcttcccaagcctctgtatttttcagacctggaatcgagcttgccttaaagacggggttctttcctgctttgcgctgttcagtatagtctttcagcactttcgcagcaattccggaaagaagcagaatcgcaatcaggttaatgatcgccattaatcccataaataaatccgccatgtcccacacaagctggaaaccggatacagatccgaagatcaccattgctacaacggctgtacggtaaacagcaagcgccgtcttgctctttttaataaattcaatgttcgtctcaccataatagtagtttccgacgattgaactgaaagcgaacagaaaaatcgccactgcgacaaatgcaggcgcccagcttccaatgtgatgctgcatggctgcttgtgtaatttgaatgccgtcaagctctttgccaggcgtcagattgaacagcaggatcataaaggctgttgcactgcagatgaccatcgtatcaaagaatacgccaagcgtttggataaagccttgcttcgcggggtgagagacattggcagtcgctgctgcgttcggcgcgcttcccattccggcttcgtttgaaaacaaaccgcgcttcgcaccgataataatgatgctgccgagcgtaccccctgcaatctgctcgatcccgaaagcatccttcacaatcatcgcgaaaacggccggtatttgagaaatattcgtcagcacgacaaataaagcaagtccaagataaatgatcgccatgaccggaacgatcaactgcgaaactgtcacaacgcgtttcaatccgccgaaaatgataaatccggtgattgcagcaaggatgatgcctaccactgttttatccaggttgaaagccccttgcatcgaaccgacgatcgtgttggcttgaaccgcattaaaaatcaagccgaatgtaattgtaattaaaacggcaaagataatccccatccatctggcgcccagcgctttttccatgtaataagcagggcctcctctgaaatgatcgccgtctttgaccttgtagacttgagccagcgtactttccacaaagcttgaagccattccgacaagcgcgacgacccacatccaaaagaccgctcccggtccgcctgttgcaacagcaagcgccacaccggtcaggttacccgttccgacacgggaagcggcggaaataaagaatgcctgcaaagacgagacgccttttcctttctcctctttttgtccgacgatacgaaacatctcgaagaaatagcggaattgaacgaatttcaatttaaacgtaaagaacaggcctattcctattaatatatagactaaataagtccaaataaaaccgctcgggacattgatgatttcgcttaaaatttcttccatagcaccctcctgaaacaaacgaattttgttttgatgttaagttttctaacatgataggattatatcataataatgacgcaagcaaaactagatagaattttctgttttttaatcgtaaaggctgatggcatcatcattactttagacccaatgctcattatagcagagtattatctttattcatacataaaaatgcgctttcatttcaaatgcgctgcgaaaaatctaatgttgtcaataattatttgcaaactgtcacaaaataatcatcttttattatataataaaatatgctaagatgatgagatactaaggggatgagatcaaatgaaaaagacattgtttctgcaactgtccatattctttttagtcattgcgagccttcattcgttctcaatgccccagatgccggcaaatcaccatgcgcaaaaagccgctgtttcaggagacgaactccatgaactgacagtcggaaaatatggtgaagaaaaggcgaaatcattatggaattcactcggtttcggagctgaatccgtccttctcttaatcttagctgccgcttccggtcaagcgttcatgatgaacaggcggaaagagcatctgaaggcatttatgctcgcggtgttctatcactcttcttatttcgataaagcgcatgttttaaaaccataaccatacaaaaaaagcgggaggttttaacatgttatttatcataagaatggtgattattggactattttcattgacagcaatcaatctgtttgtttttcaaggaattgaattcatgcacgcgattaccgatcttttcaatcgccaggacagctgaatttgaagcgatttgaaaaagctagacaataaaatttcatgaagcagtttgtttggcatgaatccggcattgtgcgggttcatgccttttcatttggtcttcatccgtttagcgatggctgaatcgctgttttatagcagaacatcccttttatagttttacatacagttcttccacctctttcaaaaactattaaattttttcgaaaaattttaaacatattttcaacaaatgccgcggctttacttcaaatctacaaatataagatataatattcctgtaccaattaaataccaattacttatagaaagaagatgtttatatgagtaaagtatctggaaaaattgcttttgttactggcggcggtcaaggaattggagaagcaatctgcaaacgattggcagaggacggattcgcagttgcagttgccgattataatgtagaaactgcaacacaagttgctgaggacatcaataagcttaacggcaaagcaattgcggttaaagtggatgttgctgatcgcgatgatgtttttaaagctgtcgatgaaacagtaaaacgtcttggcggtcttgatgtggtgattaataatgcgggtcttggaccaaccacccctattgaaagcattacatatgaagattatcggaaagtctatgatgttaacgttggcggtacttattggggaatacaagcagctgtaaaagcctttaaagaacttggacacggcgggaaaatcattaatgcatcttctcaagccggccaagtcggcaacccgggcttagcggtttacggaggaacaaagttcgctgttcgcgggattacccaaactgcggcaaaagatctagctgaattaggtattactgtaaacgccttttgtccgggtatcgttaaaactcctatgatgatggggattgcacagcaaaccgctgatgaagcaggcaagccgtttgaatggggcatggaacaattcgctaaaaatattgcattaaaacgcttatccgagccggaagatgtagcagcatgcgtttcttaccttgcagggccagattcagattatatgactggtcaagctcttatcattgatggcggaatggtatttaattaattttaaaattatattctatatggagggcggagttttcccctccatatttagtattgaataatcagctatatagcatggcttaaaaccgtgtaatacgaaacggccacggcgtccaaccacgccttgatttatggttcacgtttaaaaaacaaagaacgcaggccgttggttcctcccccatcggcaaatcgtggcgtccatgaatttcgaatcgcatcaatacttagcgtttactgccaaattgtcattctaaacgcccttcttcttgaagttttcccaatcttttatgattgcccaggtccctttatctgttgaaggacggctccatcatttaggatataacgaagcgggacaattgagcggaaatgatacaaacaagaggctaattttaattaaaaaaaggccgaagtgagcaacttcgccctcaagcaaggcgccgtgaggaaatccatatgtttacgatcttttgaacccctgtttcaaaatacactagtgcgaggatttcccctgcgataagcggcacccaagatatcttctttgaattctactccaagcctccataggttttatttacgcgctttttccgtcaactcgtttattttctccatttttttcgatttcctctaaactgcgacctcgagtttcagggacgcgtgtccggataaatacaactccaagcaaacaaatcacaccgaagattgcaaacacagcttcttgagacatcgaagcggtcataacaggaaatagcaatccaaccaagaaagaaccaatccagttaaatgatgaagctaaaccagacgcacgcccgcgaattaccagcgggaaaatttctccaactatgacccaagttaaaggagcccatgtgaatgaataaagtgctacatagatactcaaaaagacaaccatcatcatcggattcgcattaggaattaatatattcaatattgccggcaaaataaaggacagccccattattgttccgcctactgttaataaagtacggcgattaaatttatcagcaatcactaagaatattaatgaacctagcacgagaataactccttgaataatcggccacatcaaagctgaacttgctgcatttcctgttgctttttctacaattaaaggaatgtaataaaaaattgcgtttgcaccctggaattgttgaaaagcagcaacacccacaccggcaattaataaaaaacgatatttattgcttaagagggtagcccatgatgcattttgatttgccttcgcttcttctctggcagtttcttgaatttgcgttatttcagaatcaatctctcctttgttagagcgaatatagctcaacaccttgcgagcttcatcaagtttattgttctttattaaaaaacgtggtgattcgggtaattttagcattccaacatataagatcaaagcaggtacagcagccaaaccaagcatcaaccgccacgccattgtttccggcaaatctttcaatagaaaatcaacaatgtaagaaagcaacattccagaacaaatcattgtttgattaattcctgacagccgtccacgtaaacgtgcaggcgccatttccgacatataggctgggaccaatgcagaagcggcaccaacggccaatcccaataaaacccgagaaacaatcaaaaatagtatcccattatgaggtgctattcctgacaaaatggatccaacaacaaaaatgatagcggaaattaaaatcattttgcgccgtcccaaacgatcagaaagttgtccggcaagggcgcctccaaaaatagcgcctaacattaccgaagaggtaatccatccaataaccccggcgttgtcttgaaggttccaatcattttgcagaaaaggcaaagcacccgtcataacgccgatatcataaccgaaaagaatgcccgcaaaagccccaaaaaagtaaatgaagccacttgagattttcttttcattaaccattaaagtttcctcctcaaggttgaaattaaattgtgtaaaaatccactgcaaaaatattgaaggctttttaagaaataataaaagcgctttcaatccgcaaatacatgccaggatattatttggtgggatttctccctaaatctcatggttttattcgcctatttttaaacgctttcaatttttactgaatgtcgcgataacgcttacaaaatcataaatattttgaaaactgatgcctattttcacctccaaggaagcagcacctcctcggaggttagaggcattacttaatcactacatattccaagtcaacgagctttgcataagtgatcatttggtctgttgttaaattcaatgaaacaactgtatggtggccgccgccattctcaagccatgctttcactccatcttggaagttaggcttcacttcccaaagcacccgtgcaactggaaggtttggtgctggaacagttggttcaaatgcagaaacttcgttaatcaacaatttgtagtgcgtaccaaagtctgccattgaaacaaccacgccatctcctgcttttccgtcgaacactaggcgtgccgggtcttcacgatcaccaatacctaatggagagacgataatttttggtttattgcttgctaaagatgggtcaacttcaagcatatgcgattgaagaattgattcttgaccggcagccaattcatatgtgtaatcttccataaaaccagttgattggttacggctcatcactttgagcaagcggtcgagcgctgcagttttccaatctccttcaccggcaaagccatatccttgcgccatcaaacgttggacggcaagacccggaagctgtttcattccatataaatcttcaaagttagttgtgaaagcattgtaaccaccatcatcaaggaaacgtttaatagcgatttcatagcttgcttgtacttttacactcttctcccaatcttcccgactgtaagtgccataatcaaattcataaaggtctgcgtattctgcaaacaaacgattaatctcttcatctgtaaccgcattcacgtattgaacaagatcaccgatgccaaagtaatcaactgtccagccaaattgaatttgcgcttcaatcttatccccttcagtaacagcaacgttacgcatgttgtcaccaaaccgagcgaccttgatgttgaagctttcgttataagcaaccgctacgtccatccattctgcaatttgctgttgcacttcaggtcgctcccaataacctacgacaactttattttgttttttcaaacgggcattgataaaaccgtattcacggtcgccatgagcagattggttgaggttcataaagtccatgtcaatcgttggccatggaatactttcattaaattgtgtcgctaaatgaagtaatggtttttgcaataattttgttccgcgaatccacattttcgcaggcgagaaagtatgcatccaagtgataacaccggcgacttcgtcacgataatttacttctttcatgatgctagtgattttatctgcattaacagccaaatcttgcaatacaagcggatatggcaaaacagcgctttcatttaatgcatcggtcatggcttgcgcgtgcgctctgacttccgctaacgtttcttccccataaagatgctgtgaacctacgacaaaccaaaattcttttttccctgttgttaacataataaccctcttttcttaaattgatgggataattgatagtttgatagaattgacattacttttgaccataataagcatttttaccgtgttttcgtaagtaatgtttatctaaaatacgttgtggtaattcttttgcaaaaagatttaattctcttgtaaataaattcattttcgcaacttcctccaacaccacactattcaatacggctgattttacatctttgccccaagtaaatggaccatgaccgtgaagtaagacaccgggaacagctaaaatatctaaccctcgctcctcaaatgtttcgataatcacatgacctgtttctgcttcgtaaccgcgatcaatctcctcttgtgtcaagtaacgggcacatggtacggaaccatagaatgtgtctgcatgagtggtccccatcgctggaacatcaaggcctgcttgagcccagattgtcgcccaagttgaatgagtgtgtacaattcctccaatttcagggtagcgcttataaagcactgcgtgagtcgctgtatctgatgaaggcctcagctctccttcaacaacattgccatctaaatcaacaaccaccatatcactagctttcatcgtttcataatcaacaccgctcggtttgataacgaatagacctgtttcacggtcaatggcacttgcatttccccatgtgtatttcacgagtccgtatttaggcaggtccaaattcgcttgtaatacttcttctttcagttgttctagcacgtcaatccctccattaaatcaaatggtctacagcggcctgctcaatcattaaaccttttttgtaccgttcgataaatgcttcaaatccttctacatctaattgatcagggtaaatttcctgcccggcatcctcttcaaagacttttttgtcgaggaagtcttctaagctctcttcttgacctttgttcatcatgtaagaagcaagaatagccattccccacgcaccgccttctccggctgtttccataactgataccggcgtattcattgcagctgcaacaattttttgtccgacaagaggggttttgaataaaccgccgtgagctaaaatgctatcgatttcaattttttcctctttggtcaaaatatccattccgattttcaaagcagcaaaggctgtaaaaaggtgtgtccgcatgaagtttgctaaattgaaacgactctctggtgagcggacaaataatggccggcctttttctaatcccgtaatattttcaccggagaaatagccgtagcttagcaaaccgccgccatctgagtcagcttccaaagctttatttaacatcacttcgaataatttattcgtttcaatcttttgtcccattgcttcaaaaaattcacgaaacaatcctagccaagcattaatatcgcttgagcagttattcgcatgaaccattccaaccggactgccgtttggcgttgtgaccaaatcaatttctggatatacttttgaaagttctttttctaatacaatcatggcaaaaactgaagttcccaccgaaatgtttccagtgcgtttcctcacactattcgtagcaaccattcctgttccagcatcgccttccggtggacaaattggaatgcctggttgtaaattttttgactgatccagaatttttgcaccaatttcggttaattcaccagcctgctcgcctgaaatataaactttaggaagaatatccttcagcttccaagggtagcctttgttcgaaatcagttcatcaaactgcttgaccatcgattcattgtaattttgcgttgattcatcaatcgggaacatgcccgaagcatctccaatgccaattgctttattaccagtcagtaaccagtgaatgtacccggctaaggtggtgatatagtcaatgcgaggcaaatgcttctcttcatttaatatcgcttgataaaggtgagcaatactccaccgttcggggatattgaattgaaattgatcagttaattcttttgctgcagcaccggttgttgagttacgccaagttcgaaacggaacaagcagctcccctgttttgtcaaaagccatatacccatgcatcattgcagaaattccaatagaaccgattttgcgaatggtgatgccataatttcgttcaacttcattcttcatttcactataagctgttcgcaatccagtgataatatctaccaagttgtacgtccaaaatccatcttccaagaggttttcccactcatagcttccagatgcgattgtttcaaaactgctatcaatcaacactgctttaatacgtgtggatccgaattcaattccaagtgatgtttctccctcagttatggcttgcttgatgtttactcgattcgctttcacgtaatcccccctctgatagcgatttcattataattcgaaagaaagcattttcctttccgcttaactttattacaaccttagtatattttttgtacgtacatatgtcaatctagaatataatatgttcatataaatatcacaacgatattttctgttatttttctcttaatgtttataataaaaggtatttgaataacataaaacctaaagaaaatttttataattgctagttaattttcacgaaaataaggcggaatcttttaattcattgtaagccatgataaaatatgtccacacaaatcattcaattaaaaaaattagaatgcgaacaactgcgaaagaagtgagtgaaatgaaaccaaagtataaggtcatcattaatgacataaaaagtaaaatactttcaggagtttacagagcgggagaccaaattcctactgaatccgccatacaggaagagtacaaagtcagccgccacactgttcgaaaagccattttagaactatcgaacgaagggttcttaagaagtgaaaaagggtctggcacttatgttagtaaccagtatcaatcaaaagccggcgggaattccaataacaaaataatcggtgtaatcacgacctacatttctgattacattttcccctccattattcgtggaattgaagggagattgaatgaggctaattattcgttactattagctagtacaaataatgatgtcgaacaagaaaaaaaagctttggaaatgatgctgtcatttggcgtagatggtttaattgttgaacctacgaaaagcaatctgtacaatcccaatattgcctactacctatcgtttaaggaacaggatattcctttcatcatgatcaatgcttattatgaagaattagatgttccttttctttgtctcgatgacgtgcagtcaagctatctcgcaacaaaagaattaatatcaaaaggacatacacaaattggtctcatttcaaaaatggatgatttacaaggaaagtatcgaatgaaggggtatataaaagcgcttggtgaagccaaattacgattttacccggagcatgtgctttcgtacaatacagagacgaagctggacctatacacagacctgaagaagtttctaaatgaaaaaagagacgtgttgactgcaatcgtctgctacaacgacgaagtagggctggaagtagcaaatgtatgcagacaacttaatatttctatcccggacaaattgtcaattattggtcaggacaattcgtatatcgccaaaaatgcgaatatcaaactaacaacattgacccatcctcaagaacaaatgggacacgatgcagctgattgggtcattaaaaaattacaaggaaagaaggatttaccaaacgaaacctactatcaacctgtgttagttgaaggcgaaaccgtaaaagagttagaaatacaataatcatagcgtgatcaagaaaaacccagtccatgttcactaaaggcgcgaacacggactgggttgttttactctggtatcaattaagcaaagaaatgttgaatcagaaaaacgggcgaaaatctcaccgaagagaaaaaatcagtctctgatatattagatgctgtataattgtgtcacaagaaagtaacatcgtgctgtttaaggtttatccggcatgctctttttctgagcattgaaacggcttgatagacatgtggtgacgcccctagatattgaatgatcaacggcgtgctgttcgatttcactccagctcatgtttgctgatccatacatccgttacttcccctgcttcatcttcgtcgatgatgaaagaaccgttgctgtaccggtcatgaagcttgatttctttgacaagcatctcctctgtgatgcctttttcggtttgaagcgtgatttgatcatgatatgaacatgcgagcaggccggcaatgcggtgaggttttttcttcagttccctcagcatgagaacccctcgtttcgcccttgacgttttttcaaattcgctgcggttcatccgcttaatagatccgcgctgggtcacgagcacaagcacgtctttttcctctaaaacctgtccgctggcgacaaagtcgccgtctttcaaattgacgcccttgacaccggccgcccttgcgccgacgacgctgacttcatcttctgtgaaccacagaccgtagccggaatgtgtcgcaataaacaaatctttcgttccgtccgttacatgaacatcgaccacttcatcgtcgccttttaaattaagggcaaccagtgcttttgaatagcgctgtgctttatactgcatcagctgagttcttttcgccattccgtttttcgtaaagaacagcaggtattcagattcggtaaactctctgacaggaatcgccttgacgatggactcatcgctgtcaatcgatatgatattcgttatatgctgacctaaatctttccatctgatatcagggagctggtgaactggacaatagacatagctccctttatttgtgaacaagagcagaacgtctgtcgtattcatttccagctgacagagcagacggtcggtatctttcatgccgaagtcctggccgtttgatgcggcgaaagaccgctggctcgttcgtttaatataaccgtctttcgttacggtcacataaacgtcttccgacgccaccatcacttcaaggttgattttaatttcttcgattttttcttcgatgacagagcgcctttgactggcataggtttttttcacctttttcaagctgtctttgatcactttcaaaagtttcttatcattggaaaggatctcttccagctctttgatcttctggtccagttcttttgcttcttcctggagggccgtaatatctgtgtttgtcagcctgtacagctgcaaggaaacgatcgcttcagcctgcggctcagtaaatgcgaacttttcgatcagattgtttttggcatcgcgcttgtcattggaggagcggatcgtcgcaatgacctcatccaaaatggacagtgccttcattaagccttctacgatatgatgcctttccttcgcttttttcagctcatactgagaacggttggtgatgacttctttttggtggccgatataagcgtccaaaatcgatgtgagattcatcagcatcggtcttctgttatggatggcgaccatgttaaagttgtaaggaatctgcaaatccgtgtttttgtataagaaatttaaaatgccttgtgcatccgcttcttttttcagctcaatcacgattctgaggcctgtccggtcggtctcgtcacggacttctgaaatcccttcgaccttccgttcaatcctgaattcgtccatttttttcactaaattcgctttgttgacttcaaacggaatttcagtaatgacaatttgctggcggccgcctctgattgtttcgatctcggctttgcccctgatgatgatttttccttttccggtttcataggctttttttatgccttctttcccctggatgattcctccggtcggaaagtccggaccttttacgaactccatgaggtcatccacgctgcagttcggcgagtcgatccgcttaatcacggcatcgatcacttccccgagatgatgcggcggaatgtcagtcgcatacccggcggaaatccctgtcgatccgttgacaagcaggttcgggaacattgccggaaggacgacaggctctttgctcgtatcatcaaagtttggtacaaactcgaccgtttctttgtcaatatcccgcaatagctctgacgcgatcgccgcgagccttgcttctgtataacgcatcgcagccggcggatcaccgtcgatgcttccgttgtttccgtgcatttcaatcagcacgttgcgaaccttccagtcctggctcatccgcaccatcgcttcgtagaccgagctgtctccgtgaggatgatagtttccgattacattaccgaccgtttttgcggccttgcggaaattcttatcgtgtgtgttcccttccgcatgcatggcgtataagattcttctttgaacaggcttcaggccgtcgcgcgcatcagggagcgcccggtcctgaataatatatttgctgtatcggccgaaacggtcgccgatcacgtcttccaatggtaaatcatgataaatctctggctgtgccatttatttaaacctcctcagcgaccgataaattctcgttttccaaaatgttgctttcttcatcaagtccgaaagcgacgtttttctcaatccattttctcctcggctcaactttgtcgcccatcaatgtcgttacgcgccgttccacccgggccgcgtcatcgattttaaccctgacaagtgttcttgactcggggttcattgtcgtttcccaaagctggtcagcgttcatttcgccgagacctttatagcgctggatcgtatatccttttccgacttttttgaggacgtcgtccatttcctcatcagaccaggcatattcaatgatttcttttttgcccgaccctttgctcactttatagagcggcggcagtgcgataaacacttttccgtgctcgatcagcggcttcatatagcggtagaaaaaagtcaggagcagcacttggatatgcgcgccgtctgtatccgcatctgtcatgataatgactttgtcgtaattgatgtcctcaatgtcaaaatcggcgccgacccctccgccgatcgcgtgaatgatcgtattgatctcttcatttttaaaaatatcggccagcttcgctttttccgtattgataacttttccgcggagcggcaggacagcctggaatttccggtctcgtccctgctttgctgatcctcccgcagaatcaccctccacgagatacaattcgttcttggatggattccttgattgtgcaggcgtcagcttcccggagagcgtcgcttcggatttctttcttttctttccgcttcttgcctcttctcttgcttttctcgcagcctctctcgcctgggaggctttaatcgcttttttgacaagcaatgttgccgtttccctgttttcttcaagaaaataggcgagctgctcagagacgattgcatcaacggctgaccgtgcttcacttgtgccgagctttccttttgtctgtccttcaaattgaagaagctcttcgggaatccggacggaaacgatggctgacaggccttccctgatatccgttccttcaaggtttttgtccttttcttttaaaagggccacctttctcgcatactcgttgaatgctctcgtcatcgccgttttggcaccggactcatgggttcctccatctttcgttctgacattattgacgaacgacaggatgttttcggaatagccgtcattaaactgaaacgcgaagtcaacctcgatgccgttgtgctctccttcaaatgagaccacttcagaaagcgcgtctttctcctcatttaaataagcgacaaaagcttcgattccgttttcgtataaaaacgtttcttttgtttgatcgcgttcatcgatcaattctatttttagtccttttaacaaaaaggctgattctctcagacgctctgaaagcgtttcaaagttaaacgtcgtcgtgctgaacatcgcaggatcaggcttgaaatgaatcagggtgccggtctttttggtcgttccgattttatcaagggatgtcaccggtttgccgccgttttcaaaacgctgcctgtaaacatttccgtcccgctcaatcgtgactgtcagccactcggacagggcgtttacaacggatgcaccgacgccgtgcagccccccgctcgttttatagccgccttggccgaactttcctccggcatgcagcactgtcaaaataatttctggagtcggcttgccgagcttatgcattcctgttggcattccccggcctctgtcttgcaccgatatgctgttatctttatgtatttttactataatgtgatccccatggcccgcaaggacttcatcgacggaattatcgacgatttcatatacgagatggtgcagtccccggctgtctgtcgaaccgatgtacataccggggcgttttctgaccgcttcaaggccttcgagcacctgtatggaatcatcattatagtcaacttgctgttttttaaccaaatgcataaacccctttcaaaaatcaaacattgcttataaagaataatacacactctgtcatataaagcaaagtattatccgattattttccaatttcttcaagcattgtcgggaacatgttaaaatgaaagccgctttttgcacagccgtcattttacacgattcatcacccgcagcacaaggctttccacatcgcaattggaaaatcattcttaaaaaactgtccaagacttattgtagccgtttttcacagcaattcgcaaacatattctcgcataaaaaagacaaaaacccttgaaaaaacaaggatttttgtcttttttatgccgattttgttaacgagtgtgccacttttatgcacaaatccataatcaccgtatagcctttttcgctcagaagctgataagcttcttcattgacaagcccctgctgcgcccaaaacacatctgcgtctatctccaggaattcctttgcgacatcaggcagatgctcggatcttctgaacacattgacgatatcaacgtgtccttcaatgtcttttaaggatgccacagccttgacgcccagcgcctcatcaatggtcggattgacagggatgatgtcatatcccgcgtcctgcatcgcttttgataccatgtacgatgttctttcagggttgtcggacaagccgactaccgcaattcgtctgctgttttcaagaatggttttgatttcctgtttagaaggattttccacaccgatcactccttttaagttcagtttacacgaaaacaaaggagataatcaaaattttcatatgattagcgcgcattatcttgtatgatatatacggtacttctaaagaaaagccgtcatggaaggcgcctctcatgttaaaataaagagaagggatcatctaaaaaggagaaatgaaatgttaatagctttattatttattttagcctatctactcggcagcattccgtccggcttgattgtcggaaaggccgccaaaggaatcgacatcagggaacacggcagcgggaatcttggcgccaccaacgcatttcggacactcggcgtaaaagccggctctatcgttgtggctgcggacattttgaaagggacgctcgccgcctttctgcccgccatcctgcacatcggcgtacaccctttgctggccggcgtagccgcagtcatcgggcatatgttccctgtgttcgcaaaatttaaaggcggaaaagctgtcgctacttccggaggcgtattgctttgctatcagcctcttctgtttctcacaatggttgcggtgttctttctgtttttgtatatcacaaaatatgtatcgctttcttccattttaaccggcttgtatacaacggtttacagtctgtttacgaaagaccttttattggtggcagtcgtcgcctttcttacggcgtttgtcgtatacagacacaggacgaacattaaacgcatcatcgataaaaccgagcccaaaatcaagtggatgtccggcaaaagatgagcctatccgaagaacattatattttcatgatcggacaaaaacgttatatactataaatagattcagcatgctttgaaacaaatgatgaaggagtgcttgcccgtgaatttgaaaattaatgaagaggcgcttaaatggtataagaacgagcttgatttaaaagaaggtgatcaggttcgcttctttgtccgctacggaggatgcagcaatgttcaaaaaggcttctcccttggggtctcaaaagatgagccgcagcaaatcggtgtaagtgcggaaaaagacggcattacgtttttcgttgaagaaagcgatgtatggtatttcgacggccatgatctgcttgtcacctataacgaatctgcggaagaacctgtttttgaatatcagtaaaatatcattttttacggcttgcagagaatcccccgtttttctgcaagtttttttatttttcttcgtcattgaagtgccgaaaaaaagccttcaaaatctagggtggcttgcctgagtgttcggcaaatgtacaccgcgagctgcgtaaagctcctaaaggacattatatacggggcagcaaacacgaataactgagcgggtacagatcctgtatatctaaaatacagttcgtttaaaataaagcggcaaggatttccccattcaataaagatttttacacactctaatattatacaaagtcatttacatcgaggtgtttggtcatggtttacggtgtgacaacttttattttactggctgtttttctgatcttttatttaacggaccgaagaaggatcatcaacggttttttattcaatctatttttttgttcatttcttgttctttcctactatctggcatacgttttcggaattggctttttcagacttttcgtcattgtaccgctgctgatctttttctttatcctaacgttcggtctatttgctttaatgatcgggttatttctgaatgcgagaattcttatcaaaagagaaggacgacgattgtctaattgtttgactttaatttccgggctaggtattatcatattttttctattgtcagtgattgaccccgctcgttttttatcgccaaatgttcagccgttgtttgcgggatcatcgcttattgcggtctatttcttctttcatttaacaaatttcttaacagcctattttctatatcaatttaacagaccgaaacttaatcaggattacatcatcgttctcggaagcggattaattaacgatactgtacccccgcttttagcaagcaggatagataaggctgtcgatttttatcggaaacaagcagctgttgctcctccgccgaaaattattttttccggcgggcaaggacctgatgaaaacctttctgaagcagaagccatgcagagatatgctttaaaaaaagggatacctgaagagcacactttcaaagaagaccgttctgtaaatacatatcaaaatatgcttttctccaaacaactgatggactcattatcagacggcaaatacaacagcatcttcacaacaaacaatttccacctgttccgcgccagcctatatgcaaaacgagcaggcttaaagagccaggggatcggttcaaaaaccgctttttattattggccgaacgccatgatccgtgaatatatcgctgttgttgtaatgaatcgtaaacggcatagcattgtcgtaggtactattttaggtttttctataattttgactgctcttaattttttcattgattaaaacttcaaaaatgcgtcttgagattttggtttgtccggatggcacactttctattgcagtcatccccaacaagggtgcagagatatattgatggaagtcccaatagataatgatggatattttcaaaggacatcttcgccggaaagatgtccttttgctttgaaaacattacaccgtcatgttgatgattctaatgcttcctgagcaatgggcaacttccctgctccaagcagctgtttttttgatgcgcttggacttttattgcttacaaatgtgaaaggaatatgtaagataaatcaatggtttcgttgggaggttttatatatgatgggttccgaggtgataaatgatgaaatggtttttaggaattttaacggcaggactgataattttggtcgggggctactttttatattccggatattattcaacggaagattattacgtcaaaattacaacagatccaaaagtcgtgaaagaaaaagcaagtgatggatacacatatataaattataactatgatgttacgggttatgataaagatgggaaatccaaaaacctaaagctctcttctcaagaaaaaatgcagaaaggtcagtactatattattcattgggaagatagaagggaaatcatatccagcaaagaaaaagcgagcgagaagcaaatagataaggacatcctgcataaattagacaatcaaaattaatcagccgctcactctttccccctaaaacttcttgttttagggacttttttacgaaaaataaaatggcttatcaaggcatgaaaaacactgaagtaaaggtgaactttgtgattgaaacagatgatgacaatataactgaaactaaagatacgtttttgctcatcaaaatgaaacaagcaagaacaatgcttgcttgtttcaaggatgtccgagtttctttaaaacaccgtattattcaagcctgaaacgcttgatatggcttgagagcttttcttgttttaaaatcatgatctgcttctctcccaataaatcaaagtggggaaattcgcttcttttatcaatccactcttttttcagtccgtactgtttgccccactctgcaagcttctcaatgttcgcgcatcctgcttttgtcaccgttttgacatccggatacctgtcatcgagccagtaatgcgtaagaaacgcaacttcgccgtttaaaacggcgcgcttccattcgttcagctcgtttcttttaataccgaacgccattactttttggcctcttcgtatgcttcatgccactttggataaagcttgcggaactgaaccggtttgaagctgtccccgtcaacgcaaatatgggacgatgttcccttcacagcggtttctccggcggaattaaaaatttcatacccatataccgttttaaagccgttgtaatcttcaatccacgtatgtaccgtcgctgtttcaccgtagcgaagaggtttgacgtagcggacattgatatccacgacaggcgacaggatgccgtctttctccatttcggcataagaaaagccgagttctttaattaaagccgtccggcctacctccatccaaatcaaataattggcgtgatagacgacacccatttggtctgtttcggcatagcggacttctatttctttttttgagacgtacaaattccctctactcccttttcacaaatgtatttaatccaattctagcatatacaatgggcaaaaacacgacggacggcttcatgcaaaaaaaccaggtcgccctggtttattgatgatatccgtttttgcgggcttccgcctcgtcatggatttcattgcgcatcgcctcaatgctttcatttcggcgttcatttttttcgcggatctgttcctgttccgcctcgctggcaaaagacagctgctcttcagactcctcaatgttttcgattgtgttctgcaccatgtcttgaagcttttctacgttgtctgatctgtcatccggatgatgtttttgatgtgtcattcgggtctctgcctccttttcatctttactcgccttttgtctgcataatgatcggtgtttctcctgatttatcatgcatcttttttcctttgttgcgcttatattctaccggttttgtcccaagatggctcggggcaaatttagactgtttgtcgtgttctctcggcatgtctatccctccttttcagcattaggattctcaaaaaggagcgtaaacatgaatcgatttttaaaaactcacttcagcttaaatttctcttcaagcttatcttccagccgatcaagaaactcctggttggtcatgagctcctttttattttccgagacaagttcttcaaatgttcgccttttcgcttttttcatgttgaatcacctccagcttgttttcattttcaccattttttgggcaatataagcaaaaaagccgggattttttataatcccagcttttcttccatattctttttcgacatcgtccccagcacgatatctttaatgattccgttttcatcaatgataaatgtcgtcggatatgaaaaaatctcgtatttcgcattgatgcccgttcggtctaagacgatggggaaatgtaaaccgtgcctttcggcaaacgctttgaccgtcttttcgtttttctcggaagatgtaaagttgacggctaaaacggcaatgtcctgattttcattttgaagctcttccattgcaggcatttcggtttcacacggtctacaccaggtggcccaaaaatttaacagcacttttttccctttaaagtctgacaaagatacatcgtttccattctttaatgacggcagcgtaaaatcaggcgccttgtctcctttctcaatgccgatttcggcttccttttgccctgtaaaattccaaaccgcaagaccggccaagactaaaagaaacgcggcagccagcacttttttcatcatcggcatcctccacattcaggattacgctgaaaaaagaagagaaagctaaaggctctctcttcctcattcaattactgtttcattttattgcggagcaccatttgcaggattccgccgtgacggtaataatcgatttccacttcgctgtcaaagcggacaacagcttcaaacgacttgaccgtgccgtcttcggcaatcgctttgacttggacgagatcgcgcgggcgcaccgactcactcacgtctacttcaattgtttctttcccggtcaaaccgagcgtttcagcgttttctccctctttaaattgcagcggaagaacgcccatcagcacaaggttgcttctgtgaattctttcaaagctttctgcaatgacggttttgatgccgagcagatttgttccttttgccgcccagtcgcgggaagaacccattccgtagtcttttccggcaatgacgaccagacctgtgccgtcttctttatacttcatgcaggcatcataaatggacatcacttctccggtcggccaatacgttgtataaccgccttcagtgcccggagcgatctggtttttgattctgatgttggcgaatgttcccctcatcatgacttcatggtttccgcgtcttgaaccatatgagttgaagtctctaggagaaacgcctttttcctgcaaatattttccggccggcgtgtctttgccgatcgctcccgcaggagagatatggtctgtcgtgacagagtctccgaatttgccgacaatgcgcaagcctttaagcggttcaactgtacctggctcaactgacatgttttcaaagaatggcgggttctgaatgtaagtggactcttcatcccatttatacagggcttcatccgttgtttcaatcgcattccagcgttcattgtcatcaaacacgcgctcgtattcttttctgaacagctcaggagtaacggtttgcttcacgacggaattgatttcgtccatcgtcggccaaatatcgttgaagtacacattttgaccgtctttgccgacgccgatcggttcgtttttcaggtcgatatctaccgtacctgccaatgcataggccacgactagaggcggagacgccaagtagtttcctttgacaagcggatgaatccggccttcaaagttacggttaccggaaaggacagacgtaatcagcaggtcgttttcggcaaccgctttttcgatttcaggcgcaagcggtccggagttcccgatacatgtcgtacagccgtagccgacgatgttaaatccaagctcgcgcatatacggcagcaggcctgaattaaccaagtagcctgttacgacttttgaacccggagcgagagatgttttcacatagttcggtactttcaatcccagttcaaccgcttttttggcgacgaggcccgcaccgattaagacataagggtttgatgtatttgtacagctggtaatcgccgcaattgcgatcgcacccgttttcatgacggcttcttcgccgttttcaagcttaaatttgatttctttgtcagcctcgctcgcgtttaaaccgaatccctggttgcccgcagggcttgccaaatgcttgtggaacgtttctttcatgtcagtcagcggaatgagatcctgaggacgcttcggacctgaaaggttcgcttcaacttttgacaagtcgatttcaacgatatcggtaaatacaggatcttcctgatcaggcgtgtagaacagtccgttttgacggcaatattctttcaccacattgatatgttcttcatcacggcctgttaaacgcatgtattccaatgcttcctcatcaacagggaagaaaccgcaagtcgcgccgtattcaggagccatatttgcgattgtcgcacggtctgcaagcggtagttccgcaacacccggaccgaagaattcgacgaactttccgactacgcctttttcacgcagcacctgtgtcactttaagcgcaaggtccgtcgctgtcgtaccgttcggcagctttccgacaagcttcgcaccgattacttcaggtacagggaaatatgaaggctggccgagcatgcctgcttcagcttcaattccgccgacgccccagccgagaacgccgattccgttgatcatcgttgtatgggagtcagtaccgacaagcgtgtcaggataagtgacaatctcgccgtcttcttccactgcatggacaacgtttgccaaatactcaaggttcacctggtgaacaatacctgtagcagggggaacagcttgatagttattaaacgctttcttagcccagcttaaaaatttgtaacgctctgcatttcgttggaattcaaggtccatattaacggtcaatgcatcttccgtacccgctttgtcaacttgtacggagtggtcgatgacaaggtctaccggtatttcaggattgattttatccggatctccgccgactgaagccatcgcttttcttaatgaagcaaggtctacaacggctggaacgccggtaaagtcctgcaaaataacgcgggatggtttgaaaggaacgtcaatatcttttaattcggcagtgccccattttgccaagttttcaacgtgttcctcagtaatgactctcccgtctacttgacgaagaacggattcgagcaaaactttaatggaataaggaagttttgatacgtttccgattccttgatcctctaatgcttttaaagaataatagctgtacgttttgccttgtactgtaaacgtttttcttgattgaaaagcgtctttttttgcgatttgttgctgattcgccatttctccaaaatccccctttaaagatcaagatcatacgccagaaaaatcggcatatttcaccacaattttctcacaatttaatcttaaaacaattttaaacataagtaaatatcaatgtttttattaaattcaataagaatgacttatatacggaaaaaagtttattttactggaaatacatttttttatacaatacacccgctaaggctatactacagtctgaggtgattgaaattggccaaacgaaaagcaaatcatgtaataaatggaatgaacaatgcgaaacgccaaggaaacggcgcgggatatattgaaaatgatcagcacatactcactgaggcggaacgccaaaacaacaaaaaacggaaaaccaatcaataaatacgaaagatccttcatgaatatcttaggaggttaaaacattgacaaataaaaacgacggcaaagatatgcgcaaaaacgcaccgaaaggagctcagccagggcagccagagcctttgagcggaagcaaaaaagtaaaaaaccggaaccatacaagacaaaaacacaattccagtcacgatatgtaacattttttccgcgcctttcacggcgcggtttttttccttaccgcgcgtcaccctgaggcgttgtccaccctccttcacatgaattcaaaggtgtgcataatctaatggtaaggctaggtatggaggaatgctccaatgacaaatacaaaacgtttcgattccgcagattttgataaagaatggatgaaacagtttgttgacgacccttttctcctctatgatgaaactttaccgattgacctttatgaaacgagcactgaatatataattgaagcagatttaagccacttgaatgtccggcatcttgacttgacgttttcaggctacgatttcaagcttgcagttaaaaccgatgagcagctttacgagaaatcgctgatgcttcctttctttttgaatgacaaacagatcgaagcggaatgcgaaaacaacattcttgcagttaaaatcaataaagaatcaagcaaagatgacatttcgctttcaatcaatattccttttatatcaaacctgcacaacaagcagaacccggacagcgcttaaaacacttgccatccgggtttttttccgttcgttcgtcaaatatcctctagcaattctctatggccgattagggaatcgctatacaatagattatgttctagcatctcttttgaccaggccggtgtcccattttatattattttttctatgttcttctaaaacgccttcatgtaaaataggttatagacaaaggagtgatgagagatgctggaaggatggtttttatggctgatgctcgcttggatcgtcatcatgatcgtcctcttgtcaatcggcggttttttcatgtttcgcaaatttttaaaaaggctgcctaaagaagatgggaaatctgagctggactggcaggattattatattgaacagacaaggcatttgtggaatgacgaagaaaaagaactgcttgaggaattggtttcacccgtacccgagctgtttcgcgatgtagcaaaagcaaaaatcgccggtaagatcggggagcttgcattgaaagaaaaagcaggcgccatcgaccgggatttaatcatcagaggctatattatggccacaccgaaaagagaccataagttcctcgtgaaacgtttaaaagaaaagaacattgatcactctacatatcaagagctttttaaataaacaaaacctttccttctttcaggaaaggttttgttttaattgacctgtatgtgatttgacgcttcaatctggcttgaaagctttctaaacgataaatacatggcaatccgccaaggaacgatcatcccgaaagccagaatccaaaacattccgctcagtgcgccgtaatcgatcgttgtgcttaatatgctcttcatcacgatccggatgacgagcagcgcaattaaaataaacacaaacgatttggaccgtttaatatagattttatcatcgcggatttcaaattttgaggttttaattaagaaaatagaaaagatcatgcccacggtgagagcttccaaaaattcagcaccggttacgtggaacaccggaaataaaaacatgagagcaccggtgctcataaaaatcggaggcagtataatttttttggccgtagccggtttttcagatgacttgattctgacagccatgacaatgacggccatcacgatagcaagtatagatgaaacgacgatcatcatacatatcatccctttttctaaagctaatttctctacttgttactatactctaaaacgaagaaaaaaaccatgttcacgtttatcatctgcaagcatttccgagcacatgccgaatcgcttcgacgactttcgtttcctcgaaaggcttgacgatgaagtccttggctccggcttcgatcgcctcaacgacgatccgcttttgccgcatggccgtacacatgatcactttcactttcgggttcagctggatcatatcctttaaagcttctatcccgtttttcacaggcatcgtaatatccatgataaccaagtccggctgcagctcttgataaagcaaaacagcttcttccccgttctcggcttcacccgcgacttgcaagtcttctgtttcaagtatttctctaattttatctctcataaattttgcatcatcaacaattaaaacccttgtcatactcccctccaacatcattattcagttttgctgtgaataagtcctattgtaacaaaaaaccaaggcggtccttagcaaagtttaaaagcctctgaaatcgccgaacaggcctgacaatacgataatgattttcgtcatccagtcaaagaacagcaggatgccgactacaatcattgcaactccgccgatcttcatgatgatgagctgatgcttccgaagccatttcatctttgtaatgaaaaaagacagaagcagaaacggcaagctgaatccgagtgcataaagcaccatataaggcacggccgacatcgggttcgttccggcgagtgcaataaccgctgcaagaatcgggccggtgcagggcgtccagccggcggcaaatgccattccgattccgatggaaccgagcagacctccaggcctgtttttaaattggaggcgcctttctttcattaaaaattcaggcttaaaaacccccaaagtgacaaatccgaaaaagatgataaaaaccgcaccaagctgcctgatgagctgatgataatccttaaaaaacgacccgacaagcgacgtgctgtagccgagtgccacaaagatcatcgaaaagccgatcaggaaaaagaccgtatgtaccaagctccttttttgaaacataagtttgtcagaatggatttcactcatgctgacaccggtaatatatgataaaaaagcgggataaagcggcaggcagcatggcgaaataaacgatagaaaccctgcaccgaaagcgagaatataattgatatcagccatctctttctcccttctattttttggaataccatgaaagaaaatcatttgatatgacaattacatttcaatttcctaacatatcacaaaaaaggatgttgatttcacgaatttctttatataatcaattttgacaatttacccttatcaccttcagaattgaaaagaaacctatatatggatataatagcatttagtaggcaacaaaaagatgatttttacagaagaaaggataaattcctgtgatgaaagaaaatctgcttcatgaaattgaggaaaaaagaaaagagctgctaaaaatcgtcatgacaaacggcatgacttcacatatcaccattcagcacagccagcagctggatatccttctcttggaataccaaaaactatctctcggaaatacacaataatcatagatcaaaataaaaaacccggaagcgggttttttattttataaccatgttccttctatgtcataatcgcattcgcattatttcgtttgattttccatggctttcatcatttgattaattttcttctgggatggtttcatacccatctgcatcatcatcatgcgcagcatttgttcattaattggcggattttttttcaaatagttcatcatatatttacgagcaataaaaaatccgagtgcaacacctgcgagcaatgctaaaacgcccactaggatgacaacccacaaatccatttaatttcctccttcatgttgtctcgtataaagtgtactaaaccaaacgctattatacaacatttacagtccaaattcttttttttatacaaaatttctttctttcacagggttcagccagccataacgtttcatattaaaatccatcgcaagaaaacacggactgacttttcgcaatacctcaaagaaaaccgtttcggcatcgaatggaccctttgccaaaatctcaatatgacggtctttgataataaaagaagcgcttccttttggaacaatcaatctgtatacatagtcaacctgtgtatagtcttcccggcagaggttcattttcattcttttgtgtatatgagcagcgggaatcggttttgtaataaactcgatctgtttcgcggctaattgagacttttgatcggggctcgtccaatgataatcgtaaaacagtttgaacatgacagactctcttccaaaataatggctggcaaattcctcttctatcaaatacgtataataatggcgttccatccctgtctcatccccctgtttcgaaagatatatgttttctattatacaaaagggggttagaaataattgtctgatgatgataaaagaagcgactaattttgtcgaaacgaaaaaaagagaatgatccgcagatcattctctttcatatgcccgattagcgatttaacagttttttcacccggtcaactacattcgcaggcgtaaaaccgtattctttcatgatcgtttcgccaggagctgatgcaccgaactggtcgattccgagaatgtccccgtcagtgcctgtatatctctcccatccgagcggcgatcccatttcaattgcgagacgctttgtcacatcagttggaagaacagcgtttttatattcagccggctgcttgtcaaatcgatcccatgacggaacgctgacaacggatacgtcaatgccttctttttgcagctcgctttgtgcatcaagcgcaaggccaacttcagatccgctcgcaagcaagatcgcttccggtttttcgttttggctttttgaaacgacatatgcaccctttttaacgccttcataagccgtttcagcagactgatcgattgtcggcaagttttggcgtgtcaacacaagcgcagtcggctggtcttttgattgaagcgcgagcttccaggcagctgctgtttcatttccgtcggcaggtctgatgacggacaagttcggcagcgcacgaagtgatgccagctgttcaatcggctcatgagtcggtccgtcttcaccgacggcaatgctgtcatgtgtaaatacataggtgacaggaagccccatcaatgcagcaagacgaatcgctggtctcaagtaatcggagaaaacgaagaacgttccaccgaatacgcggaggcctccgtgaagagccattccgttcaaagctgctcccatcgcaaattcccttacaccgaaccagatatttctgctggcgtaatccttcgctgaaacatctccgccgtttttgattgtcgttttgttggaaccggccaagtccgcggatccgccaaagaaaaacggcacttgttgagcgattccgtttaacacttcacctgaggatgcacgtgaagcaaggctgcttcctttttcatatacaggtactttctgatcccatccttcaggaagctcgcctttgatcgccagttcaagctcttcggcaagttccgggtgggctttcttgtatgcggagaacagttcgttccattccgcctcttttttcttgcccgcttccttcactgtttcgttaaagtgctcgtacacttcggaaggaacataaaaatcttcttcgtatgtccactcatacgcttccttcgttaatttcgcctcttctgatccgagcggagcgccgtggacgccggatgtgcccgcacggtttggagaaccgaaaccgatcgttgttttcacttcaattaatgtcggctgcttttcattttgtttcgctttctcgatggccgccgtaatttcggcaatgttgttgccgtcttcaacataaagcacttcccaattcatcgcttcaaagcgctgctttacattttcagagaatgagcggtttagttcgccgtcaagcgaaatgtcatttgaatcataaagcacgatgagacggccgaggttcaaatgtcccgcaagcgaagccgcttcggatgaaattccctccatcaagtctccgtcaccgcaaatgctgtatgtataatggtcaacgacgcgatagtcgtcacggttgtaagtttcagcaaggtgacgttcagcaagcgccattccgacagccattccgattccttggccaagcggacctgtagtcgcatctacacccggagtatgtccgaattccggatgcccaggagttttgcttccccattggcggaaatttttgaggtcttcaattgaaacgtcatatccgcttaagtgaagcatgctgtacaaaagcattgatccgtgtccggcggaaagcacaaaacggtccctgttaaaccaattcggattttcagggctgacattcatcatttttgtccaaagcgcataagccatcggagcagtccccatcggcatgccggggtgaccggatttagctttttcaatcgcgtctatggagagtgttcgtattgttgcgacagattttaattcaatcgttttcattatgatccccttcctgtatggactctactttcttatcataaatctacccatcggttttcacaaccatttcagctcaaaagctgggcgaaaaatgacgaatctttgccttcattctaaattgtagtatatacaaaaagggaatacgatatcggcgtattccctaaaattaatgcaatcggcggtttcttttttcctgtttgagcttttcaggagtcacatcattaccttcagggtcaacaatcgtcacagttttcaacgtgtttttcatagacgcgcggacgccttgaaggtattcctggcgaagcttctgctgttctgctttttcttcgtctgttaaagatccgctctttgcttttttggcaagctcgttaattctggctattttttctttagaaatcataagatactcctttgattcggtatatatccatcatactactaaatccgctttcgtttgacaacagattagtctgcaaggccgtccttatactcctggtagcggcggtgaacggttgcttttgatatgctgtatccgaagcctctcaacacggctgcaatctccgcaaacgtcagcttgttctccctgagcctgacgatttctgaaagaggcgcttcgattcgctctctcccgccgccttcattgcggtgttttaggttcctctccgggcggtagccgttttcgaccgccttcttcattccccgcttaattttcaggttatgtattttccgctggtattcctcgacaatgccgacaatctccaaaaccatcgagtccgcttcggaaagctcgagctttccgcggtgagccagcgtgtagatttgaacgccttctttatataaacagtgaagaagggcaattttggcattccctcttccaagccgcgtatcatcctgtattaaaaccgcgtcgatgtctgatgttttgatttcctcgagcagatcgaagacgccgtcgcggtccatttcatatccgctcgcctgctcggaaatgacgctcacgacgttcatcccgtgttcggcggcaagcgacttaagctcttcctcctgccgctttaatgaggtttcctgctgctccttcgcagtgcttaccctggtgtaaataatcgcattcatggaaatcccctcaatctcttattctacaactgcaagctgatattgatcggagtgctgtttggctaccggcaggatcaagacatctcccggtttaatgacagaggtcggcagattgtttttatcggcgacccattcgatgaatttgtgtttgtcagcggtttttccgcaattgatccggtcggccagctcccacaatgtatcgccttcttgcacttctattttaacatattgctttctttcttcgatcttaccggcaaaagacacaaacagaatacagcagctgatcacagcagtaaacagactgacaaaaatcaatgattcttttttcatatccatcaccccagaatgtttgttcggtttttgtgacttcagtatacatacgaacaaatgtttctgtcaatcgtttttttcgaacctatgtttgtactcagaggaaaaacatgctataatctagctaaaatcgacgttttgaggtgcaaaaaatgacgaagctatcaaaaagacaacttgatattttgcgtttcattaaagaagaagtgaagcgcaaaggctatccgccttccgtcagggagatcggagaagcggtcggcctggcgtcaagttcaacggtacacggccacttggcaaggcttgaaacgaagggattgatcagaagggatccgacgaagccgagagcgatcgaaattctcgatacagaggaggaaattcatattccgaaaaaccaggttgtcaatgtcccggtcatcggaaaggtgaccgccggtacaccgattaccgcagtcgaaaacatcgaggaatactttccgcttcccgaacgcctggcgccgccggatgagcacgtcttcatgctggagatcatgggagaaagcatgatcgatgccggaattcttgatcaagattatgtgattgtcaagcagcagaacaccgcaaacaacggggatatcgtcgttgcgatgaccgaagacgacgaagcgactgttaagcggtttttcaaggaggaaacccatatccgccttcagccggaaaacccgacgatggagccgatcatccttcagaatgtgacgattctcggaaaagtcatcggcgttttccgcactgttcattaaaacacggactcatcagcaaaaccgccggtcggcggtttttttgcacgaaaaaacaggctcacatccattcggcaatgaaggatgcgaacctgaaacagagggaatgataatatgcttacattaccattatcccccacaacgattttcctgtcaacaaaaatgtttcccaaaggaaagatatttgtttttcgccttttattgaacgataaacaaaattctcgtcccgtcggcgaaaccgctcagcctgttcccgacccaggagccggctccgcggttatccgatgagctgacatatctgacagacgctcctttgcccccttcttcacacatggccatcggccattcgtcacggtcaaagcccggcttagtcggaatccccttcagtgattcctggcggcgcttatccgctcccgatctttcaatcgtgcagacatctgaatgccccgctttgattgcgtcgctgatatgagcgccggtttcgggatagcgtgatgccggaaaatacaatatgtcgtcataccttgcagcaccttcggcatgctgaggagaatatgcggcgcctcccgaaagcccaagcagtaccaatgcggaaaacagcagatgaaccgcccattttttgatcatgacaaaaacaacctcctcttgtatatgctggtgttactaacagattaagagagaattgtttttgcttttcgggttctttgtgaaaaagacgtttagattgtgtaaatgaacgtttattcttctatgacgttattttttaagatgctgcacgtcatcgcttttgcatcagaacatgaaccgttgatatcgttggtaaaaacataacttcagccgcatgttttaatgaattcccgcaaacagctccatatcgacagcccttgtgcctgtcttgccgtattatatgtctgtatcttcttgaatcatcctccaaggccgtttttcatcactgtacaaaaaaacaggcgggaaatccgcctgttcatacggcaacttcaaatgtcagcttgtcgccgtgcttatagtcgattaatttaaaatcatcgattgtaaagtcataaaaatttttgatatccgggttgatccatagctttggcgcttcatactgctcgcgtttcatctgaatgtttaaattgtcgatgtgacgggtatagatgtggcagtcaccgatgttgaagatgtattcgcccagctcataaccgaggacttgcgcgatcatgcgctgcaagacattatattgaaacacattgaacgggttgccaagcgccatgtcgttgcttctcgctcttacttctaaagagagctttccttctttcacataccattgcgtctcatagacgcagggcgtcaaagccatgccatccaaatcatcgggattccacagcatggtcaaatgcctgcgtgaagaagggttatgctttaactgatgaagcaaataatccacttgatcgactttctggccgttaaccgttctgtttttcttccctaattgatagccgtacgctgctccgattgtgccgtcttcaagacgccattgatcccaaatatgaacccccatatcattcagaacttgaacatcattggatttcagctgccaaatccaaagcagctctttaatggccgttttccacgccaccttcttcgtcgtcaaaatcggcacttctgaattgtcaaaccgcattttttcgctcatgatgctcagcgtatgagccggcgttccgtctgaatcccacttcgtccgaacctgatattcttcatcggagatccctgattcaataattttttgtatgattgcattgtattgctggtcataatggctcatcttatcctctcctctttccacatgatatgtataaaatgagtttttttcaaggtttaagatcacgcgcgggtttgataaatctccaatgctttcttgagaacatttttatcgtatcctgagatatcgtggattttttcagtccatccttcgattgtgtccggcttcgcttctctgtataatcctttgctcgtactaagatatatgtcccagccgctgaattcccaatgggcgatttcatgctgaaacggaattctgcattccagtaaaggcgcaggcttcaatgccgcctgcgagtattcagccgcctttaaaaaaacggacatgtcaacagggtctgtattgtagacttgagtcgacacctttccgttcggccgatggtaaaggacctcaactccgccggctgtcggcatgacttgaacttgtgcggcagggaaaaaaccgcccagcttttcattggtataatcttcagattcgcaatcgatcagaatcggatgcagccattggtctcccagatcacacaaaaagcgccggcctctttcatcaagggcgatgactgcggcatgcgcgcgttccgttttgaacgaacggccgattggaaaagcttccactccgtcttttgtgaactcatccagcagccaaatcgaaaggtcaaaacaattgccggcaatcccgtactcttgatagtgctccttcatcatcgatacttcccgctgtctcccatctcctgcctgatgataaaaccatgcttttgtcagcgtttccatcggaaaagagtcaaattttctccacgtacggagaatggcttccggagcaaacaacatcttaccccctgtctcagaaacgattgttaacaccattatatacgtgcgcccgagacgaaaaaaatcccttggcaagggatttttttcgttttattttcctttctcatcggttggaatctggatcagggaattcgatccggtcgctttaggcatttttccgtcccatttttggatccattgatacttgatcatttcatccgacatcgactttttaataatttcgttgtactcggcaataccttgggcttcgatctttttctttttcgcttccgcttcggcgatcttcagctccgtctgtgttctttccagttcctgcgaagacttcacgcgcgcgtcaatcgcttcctgagtcgctttatcaggcttcggcacgccgagtgttaaatcgtcaatgacaaagccgagccccttcatatcatctgcaaatgttttttgaatttctgcagcggcatcagatgatttttgtccgtatgtatcaatgacggaatatttggaaatcgactttctcgcagcgtcccacagccttgttttcaagtagctgttttcgattgattcaatatcgaccgctccgaatttattaaacaattctacgactttatcaggctgaacgacatagttgtaggcaatgtccattgagatgtttttgccgtcggaagtagccacttgaatatcctgattgtttacagtctgcatccgtaccggatatcttgtgactttgtcaaacagcccgactaaatgccagccttgatccagcgtttccgattttaccccgccattcggggaataaacgacgccgacatatccgttcgggattttctcgatgaacagggaggccgtgaatcctccaataattaaagcggcagcgacaatgattccgccgagcagcgttttgtttttatttttctttggttgtttttcattcatctttgtcgtcctccagcgttttctttattttggtcgccccgcttccgacttttttaaaaagcgggctcaacataagccatacgccaaaccctataatgagcagcaatatgatcgaaccaatcatgactttcacttttgtttcaccccttttgcatttgttgattgatcgtatgactaaataaaatcatttcacttatgtttacgttcatatgaacttaaagtttcatttttttaaaatttaatagaaaaaaattttatcattgtgaaatcatcaacttaaaagacggattcctcctgcacgggcatcgttataggatatgttggatatcttattccttatgccgcgcaattatggcgtgttcgcagtcaaatgaagacatcaaataagaaaaacggctcaactgaaccaactaaaaaaagagccagtcatttggctcttttaaatttcaaatattactgattgccctttttgacccattcagctacggtcaccgttcgttttgcttgatgtttcactgcggcttctacgtcttcaatcatcttcccgtcttgatcgactgtaacactcgttccatatggatttccgccagccccaaataggacaggatcagtgtatccaggagaagcaataatagctccccagtgcatcattgaagtatataaggacaagatcgtcgcttcttgaccaccatgtggattttgagcggaggacattgcacttacaactttattaactgtcttgccgtttgcccaaagtccgccttgtgtatcaagaaactgtttcatttgggatgccatattgccaaaacgtgttggtgtactgaatataatagcgtctgcccactctatatcttctgaggttacgactggaatgtcttttgttgcatcaacagttgctttccatatttcatttccttcaataactgattgcggagccaattcttgtacttttaatactttgacgtcagcgcctgcttcttttgcgccttctgcagcccattttgctaattgatagtttgttccgcccatactataaaaaactacagctaatttcacatttgacatatgatccatctcctttgattttctaaataatttgtctaaaaatcccatattttacacccgcttttttgttttctttttttaaaccttttaaaaaccacccccttgaaagtgtttcgctgcctttattattccttgctacaataagcttaaaacatttcagtttaataaatctcaacttcgagatatcgtggatggttatattacttcggtctttccctggtaaagatttcaccaatctttgcgtaatcatgcccggccaatcggctgatggctccgaggcctctcggatcaatttttccattttcataaatgccgctctcgatatgatattgaacgacttgacctatcatgaaatcgcagccgggagagtgtttatctcccaactctaatgaatactccagaacacattccatgcgcactttcgcttctttaacccccggtaccgagactttcacactttcaaccggggttaactccgctaactgaatttcactttgacttggaggtaggctcgcggccgttgcattcactttttcaacattttgttcatcaacgatatggaccacaaattctttgctcttcagaatgtttctcgctgtatctttttggctcccttcagaacgttgtatggacagggagatcatgggaggatttgaagatacaatattaaaataactaaatggagctccgtttaagacgccctcctctgacaggcttgtaacaaacgccacgggtcttggtatgatactcccgattaaaaacttgtagttctctctttccgtttttgtaagcggatcaatggacagcattgaatcacttccgtgcaaaaattaatccagcgccttcactgttataggaattaatcttctttctaactgctctctgtagtgttcatactgagccggcaacattaactgttctcccattgtttgatgtgattcatcatgggcgaaccctggaggatctgttgcaatttcaaataaaatctccccgtgttctctaaaataaatcgcgttaaaataatttctgtcttgcacgggtgtaacacgataaccattttctgcaacatatttttgccattctaattgatcattgtcatcaatagctctccaggcaatatggtgaactgtaccaatccccatttgtccgctgcctatagttgttaatttcaaatcaattatattcccgatatcaccagaagaacgaaaacgtacaaaatctccttcttcaccaactttttcaagtcccataaccttttctaataattcagccgttttttccggttgtttggataaaagtgttgctccgccaaatcctttgattgctttgtccggtgtaatttctcctatcttccagctgttcttttccccttcttctctttcgacaatttccagatgaagtccatgaggatcatcgaactctaagtactcctctccaaaacggttcatttttgtataaggcaaattaaattttgccaatctgttttcccaaaatgccattgcgcctttaggaacgacgtatgaagtaactcccacctggccatctccaatgactcctcggcgagcacccacccatggaaagaatgtaataatcgttcccggttttccgccttcattaccgaaatacaggtggtatgttcccggatcatcaaaattaacagtttttttcactaaacgtaaacctagaacgccagcgtaaaaatcgacattctcttgcggatggccgacaatcgcggtaatgtgatggattccgcttgttttctttttcatatcatttcactcctctttcatgaaacatagctttattaagagatataggttacaaattcatttacaggttttctaaatccccgcggttttctgctttctaatttttccttcccaagggtgatcatcatgacgacctcatattgctcatttatattcaatacctcttttaccttttgaggatcaaagccaatcatgggacaagtatcccaacctttttctttagcagccatcataaagagcatagaagataatgagccattcctgatggcttcatccctttgaaatgcttctcctctggattgatagaaagaaaccgtatcgtgaaccatatcatcatattcttgtttattaagtactccgagcagttttaaaccttcgtagatttcttttgcttgatgaaaggcctttttatcacccaaaacgatgatgactgccgacgagcttaggatcttgtattggccattagctgcttcatgcaacatgttcttcttttctttatccaacaccgcaatatagtttgtatgctgcaaattaaaagcagagggagccaattttacaatttcaaatatttcattaagctcctgttcagaaattgaatatccaggaagaaaattacttgctgatcgtctttcttttactaactctagaaattcggtcattactactacctcgcaatcgacatttattatgaattcgtatatttcgaattcgagatattgtcgtaaaaaaatttacatgctttgggcatggaagcccagttttttcaacttttcaattagaacttctttttctttaatgtccagcccgccgaaaatgcctttcatagctgctttatgtttaggaaaaagattgttcatcagtgcagttccttcattcgttaaggcagcgtatgttatacggcgatctttaggacaaggccttcttactattaaacttttcttctccagcttatctataacataggtaatactgctgcttgcgattaataccttttcgcctattttttgtatcggctgatcgcctttattatagattaattctaaaacagcaaactcagttggatttaatcctaaacatttaatgtcttcttccacacgctttttaatcgattgtaatgctcgagacaagacaataaatgcctttaaagacaactcctcttcatatctctccatatcttgactgcccatggcattcatcctttttaattatctcgaattcgagataattgtataataacgatttgcttgtgtcaactatttaaaagaaataaacgctcgctgttaaacggttgcatgtgatttgctttgttgtgcggcgtaccgaagtggattcatctgacgcaaaaaaccgccgactcaaggtcggcagcgccggctgtttcaaaagtcttatgatgtattcatagcttgtcttttatctgaagatgcagcttcggattcagcaagaaaataatggactgaagctgttcctgtttattaatcgacggatccgcgtggtgttgatggttgtagccgttaaagatggcaatcagcgtagacgccatcaccttcggatggagctgtttctgaacaatgccttcttcctgcagctgctcaatcatttcgacaaaaaactccctccactgctcatacagaagggctacctttctttgaatctcaggatatctatgactatttgccataaattccaaaaataaagctgtcgaatgctctttatttgatgtttgaatcaagtgttcaatccccgcgagcaatcccctcagcgtcttttttcgaaaacaattcatgctggtctgaaagcgatcttccatctgctcattcataatatggagaaacagcatctcctttgacttaaaatacaaataaaacgtagctttagaaaaaccggcttctttcataatttcatctacagaggttgccgaatatccattttgggcgaacagacgatatccggcttctacgatcttttgaaccgtattctgtgtcttctttttcattaagctgtctgtcctctctacttctctaattaagttaaaccgtctatgtatttaaatatactgggaacgtcaaggacttgttatgtgaaagaaaattggaaaaagccgcttaaaatctttgctcaaacatacacctgcagcctaagcggacgttctaccatcaagcatagcagtgacatataaacaccgccaagtggcataagcccggtaagccaacaaggtcaatcgccctaacaggctccggtatgttccttcccttgcaaaattcccaacattcattctagcatttactgctaaaaacttcatatatattgcaatttatttaattggatttttctgttttttaaaagcctcaatgaaatacccggggtcaacgttcacttcataagcaaataccccctggttcgtatggaggtaaagcaaaccggcctcggaaaaaggtctgtatgaaacgtcatagacgtgctccaaacgatactggcggcttgctgttaaaattttatcgttgtacaagtacatttgattctgcttttttgtataagtttgccggttaaaatcaatcgtccgttctgttttgtaatagctgacagcagcaatggcctgatggcacccgtcattcatttgaaacctccctttgctgttcgttgattaatttggacatgacatattcatcaacatattgcccttttactttcaaagcatgctttttagtgccttcaatgataaagcccgtttttttgtataaacgaacggcagctgtattatgagtcataacagtcagttcaagtctgtgaatcttttcttcacaggcccatttttccaatgcctgaaaaagctttactccaataccttgtccgatatacgcttggcgtatgccgatcaccacatgggcgcggtggcgagctctctgaacctgccccttggctgctgcaacatatccgattaagcttccgtcgtcagccgcacaaacaaaaacttcgcacattccggattcgatctgtttgatttgccgttgcgcgtgaagctttcgttcacctggttcaaacagcatgaattcagattcttcatcgatcgtttcacagagtttgagatagcttttggcatctgaatcctttatttttctgacttgcacgaaaaagccctccaaacagtctttagattttctatatattctgaattataatcgcatgaaaaaggctgtgcaaacttgcaggtgccaaatcgattcgcagcttcatcaaaaaaacagcaaaaccgccggctttacttttcaagcagcctcggttttgcagggtcgcacgcaggttcttgcgtatttgtcgattcggcgattttcattaaataatagcattcttccctcatcatatggtctgccatcagtgcggagaacgtaccgagcatctgatctgtaagctccaattcctccacttctttcaaaaatgtacggaacagttcgatctcaagcttcacgtctttgttcatccttctgagagcgggaaaagattcaacattcgctctgagatatcccgtcaattcaacggatttaatgtagaactgttcaaagtgtttgacaaactcccggctcttttctttcaatcgtttttcaaccgcatccaagtcatcggcaatcgcgccggcatgtccggcggcatccatcagccacagcatatggtggtgcagctcgtggaaaacaggcggcgcttcccgctttttcaagtattttagcacaagcaaatattcctccagttcatttaccatatggttgataaaagttggagaaaggtgaattttaatatcgcctgtcaggtgccttttaatgatgaagagtttaaatttcctgaactgaagagcatattcttcagcttcaagggttaatgaatacaaatcaggcgaagcgttcacttttttcagcaaaacatcaaacgcttgcttgaactgcttcgccttttgaatatcgtttttttccctttcggcgagagagtccaaaataaaacgcgcatgatcacctaaaacctgaagccaaaaggtatgttcgaaaacggccgtttccttataagttttcaagcttgcgcctccctttaaataccattcttcaatatggctattcgctgcaagcccgaaatatgatcataggaaaaataaagcggttcaataaagattcggaggcagtacatcatcccggtgatgttgaataactgatggcggcgtatcatgaatatatggaggcgcaggtcttaacaccggttttttcgcaaggggctgaggatgctcaacatactgaaaaacgccttctccatccatgctcggtcccttcgcccatctgcctgcagcgctctcgttgcctcttgaaaaattaaataatacatgggagacttcccttttttccagattgcgcggaaacgtacttgggacgacgacattttctttcgcttccagttctttgatggctgcaagccactggttttgatgcatcgtatcccttgcaatcagccaggagagcatatctttaacaccgcggtccgtcgtctcttcataaaggcggacggcctgcaggcgcccctgtgattccgcgtttaaatttgcccgaaagtcggcaagcaaatttccgcttgcgataatataatcggcggtccagcggtttcccacactgtcggccggcatcgcccctaatcctgatacgatggcatgctgcggattcatccctcccagaatggcaccgatcacaggatcttttgccgctttttcaagatcaccgaccggcgcaccgtccaaaagccttgcgatcatcgtcgccagcatctcgatatgggcaagctcttcagctcctgtatccatcagcagatctttgtacttgccattgcccctgacactccatccttggaaaagatactgcagagctactgatatttccccgaactgtcctccaagtatctcttgcagctttttcgcaaataatggatcgggtttatcaggctttgcgtgatactgtagttctttaatatgaaaaaacataagatcgctcctctcctgagctaccttatgaacgataagaacaataggtgtttgtctatgccttttgaatgagtttctatgaatcgctaagaatgtctgcaacccacatatcaacttgccgctcagacattcctccgacatacattcgctacgctctcccttcccgattaatgaatatacttgcaggcaaataatacatttcccaagaacggtaaacttcagccgattgatccaaagcgaccggaaaagttaagccatggcggtcgacaaagctctttaccgcacctttcgattcacgcacattgacagcgatgatttcaaaaccgtctcctttaaaacggtcataagctttttgcatgacgggcatctcctctttgcacggtgtacaaaaagccccccaaaagttgacaagtaccgcctttccccgtcattttttcagttcgatgtcaccgccctctaaagtcgataatttaaaatgtaatgcctgctgatgaaggacggcgcctgcctgttcattccggcctccggcaacatgctgataaagagcataaccagccgcagaacatagcagcaagaggatggcgcctctcaataaaagcagcgtttgttttttctcctgatatttagcattttttgcgatgatatgaaaaaaggactctggaaaagtcccctcccgcgctttctatatcaattagtagcccggcatttggtgctcaaagccgtaaaaacctgtgattccaacatccccgcaccccgacacttttgtgatatccaagaaatgatttcggtgcggcgacccgctcactttatctgcagcacttaaatgaagatgatttcccgtatactctttctcgcttaaagtgaccgcatgtcctgttaacgtgattctctgcagcttgatgttgagtgtgcagccttccgcgttaaaaatcgtaagcttgtaatacagccatgtcgggtagtaatttacattggtgctgtccgccataaaaaatcccacatgatcttcagtcattgtcatggtcatctttttctcatcttttataaccgcagcttcagcaggctggatgtgaataccgaaggccgtcatgattgaaaacaccatcaaacatacgatttttttcattggcgcccctccttttttccatattataaactttattgaataaaaaggatattgaaatttaatttgcctgcgtgtgctaaaacgatcccttacaaaagtgtaatgttcatgtcacgttattcaatttttttatcagacaatgaatcttatcattttagacagaaacataaatgaggagaaaaagtgaaaaaccatattccatggatcagcctgatgatcatatttgccgcatttttaagcggatgtaacttaaaccgtgtggggacggacgaatattatgttcacattactggaaacggggaggaagacacgtcgaaatttgacgacggcgaggaatactccgtcttcaaatatgaactggccggttttgatgaagacggtcaagaaaaaacaatggaattcacagctgataaaaaccttcgcataggcacgtttttgaggcttttctattctgaaaacaaaggcgtgaagtcatgggaagaggttgacaaagacgatattcccgccaaagccaaagagcaattaggtgtgaaaaattaaaaaagcatgcaggagatggcgccgccatctcttttatttatccctgcatgccttcctctttgctttttttaagtgataaaaactcatcctgaaaaatgcacattctaatggcgttacgataatagccgtcgacgaaaaattcatcctgcagctcgctctcgatagtgaaccctgcctttttatacaagtgaatcgcttttgcattatcttcgtcgacgatcaaatacaatttgtgcaagttcaagacggaaaatgcgtagttcattgccaaatatgttgcgcttgacgaataaccgttcccttgatgctcgggatcaattatgatttcgcctgtgaatataatcaatttcgaccagctctaccaatccgatcatctcagtctctttctctatgataaagcgccgctcgctttggtcgtgaatgtgtttgtcaaataaatcctgcagctcaacaaaagtctcgtacggttcttcaaaccaatatgacataattttcgcatcgttgttaagacggtggacaaacggaaggtcttctctttcaagcggacgcaatttaagctgattaatcatatcagcaacctccaatgcaaattaaaatttaagatgatgtaaggcgcaggccgatcaccccgattataataaagccaagcgagatgagctgcggagcacgaatacgctccttaaaccaaaatatactgactgccgtaatgccgatgctgccgattccggtccatacggcatatgcaacaccggctgatagcatctgcattgcttttgaaaggcagaaaaaagacaagccaaaccccaacaccatgacgataatcggccatttttttcttgtgccgtctacatatttcatagcgatggcggcaataacctcttcgattccggaaatcactaaaaacatccatggcatcattcatcacctcctgactgggcattgttctcttttgtaaacatcttcatgccaataatgcctcccaacagcacgatcaaaaagaatatttgccctcctgaaaaggtctcgcccataaaaatacccgtcacatatgtgccggccgttccgatcccgacaaatacggtataagccgacgccatcggaatgttcctgtaagatcgtatcagcataataaagcttaccgcgatcagtacaaagatcatcagccaatcgacgaatgaatccgcatgtttaagacctgaggcccacaccacttccaaaaaacccgcagcaattacgaggagccaactcaatgataacacccttcctattgtgaatgaacgtcagtcatttttagtccgataaaaaatgaacagctgcagccggtcattttttacttggttcctatgcttctcttcagaaaagtaaatatttcttttttgaacacactgagctcttcgtcgttttccgccccgatgtaataacgttccgctgtgttttcgacaaagttgataatcgttcgggccgtccagcgcacattaatgtccggaatgacctcgtttttctcaactgctttttcaataagtccttcaagccaggaataataaggctgatagattgcctcccatttttccatcgaatggtcaaaggcaagacctgagtagcaaagaacgataatatcctgatgaagttccgtcatgttgaacgtctcatcgatcatgatatccaaggcggtccagaaagacatggttccgtcgaccttgctcttaatatggtccaaagaatgtgtcagaagattttccgcgatcgctggaatcagcgcatttttggatgagaaataaagataaaaagtgccttgcgcagtacccgcctttttcacgatatctgaaatcgacgccttatcaagccctttttcagaaatgacttcaatggccgcctgcaaaatcttttcatatttcccggacgtttgctttgacatatgcagacctccctaaaaatgaatgactatcattcattttagatgatcggcttttcattgtcaaccggtcggcataggacttatttccttaaaatttctttaaaatcttaatcataagctgtctttggatatgaatcccttttataatttacacatataccgaaacagatggagttgatattgttgaaaccgctgatcaagctggcatgcggagctgcctcccttatcgcagccgtcctcgctgtatgttttgcagtgaaacgaacaaagacaaacaataggaattaaggaaagtactcagcatagcttttcttttgctaaaagctcttgtcattcaatccggaacttactggtttcttcatgaccgtttaagatcctttcagcatccgattgcgcgataaagcgccttactgaaaggttcccagtcggttggcgatattttgataccagtcctcattgtcgagcatattaaattttttgctgatctccctgttctgcttcaagggaaatgcaatgttcatcgtaacaatgaaatcgcaaacggttagacctcctatagatttctattaatctttttggactattatacaatatgaaaatatatactcaaaatataacacttggaaaataaatatgatataatgattactcttatgagtaaataaaggcattttaccttttcaatataaaaaacacaaaggggctatagaatggaacttacgatcaccagagcactaagcgaactcaaaatgttggataaaagaatcaagcgggccgtaaatgaagccacattcggaggcttgatgatcggaaaaaaactgccaaacggatttcggacaaccgaagacttggaatccagagcgaaagccgattaccaatcaatcgaagccttaatcaaaaggcgaaatgccattaagtctgccattgttgtatccaacgcgacgaccaaaatcgaagtggccggagtcaagatgaccgtagctgaagccatcgaaagaaaaacctctatcagctacgacattcagcttttggataaactgaaggaagtgtacgctgatttagtcggcgaagccgagaacgtcaatcaaaaagtaacggaaagactggacaagcatctcgagacacttttcggaaaagacggcaaagtaaaagcggctgaaaaccaggaaatcgtcaaatctttcctcgcagaaaatgaagcaaaaatcatcgatccgctgaatctaaaagagaagatcgattgcttatcaaaaaagatcgaggactttgaaatggaagttgactttgcattgtccgagagcaatacactcaccaaaatcaccatcgattgacggccgattgttagtcaaccgaaaaccgatcaaactaaacaccttccgagggaaaggttactccctccttttatatcatcagcacagccaaagagacgctgtgcccatattgagataaaagctcaaagctcagcgttcagcgtttaaagcttaagcatcaaagctcttaacagttcaaagcttacgccttaaagttaaaagatcgataaaatctgggagaaacggctgtttgagcatttgtttaccggctcagtcggttgccgcccagcaggttggctaacaatggatatcactaaaaaaacgtcttaacagacgtttttttagtggattccaactcaaaggatgagctcaatctttctgtttgtccttttcgatatgcacccaaagataataaatcaccccgcctgctaaaataaacacaatccccaagtacctttgttctgagggaacaaaaaattgaaataaaaaccctaaaattaaagccggtaccataatcatgaagtatttctttttatccaacatgtagaacacccttgcattagttttagctaaatatacgatataggtgctgtttggtttcaatttttaaagattccgctctgatttatgacaatatgaatctggaataatgacgaaaacctcaaaggtctttttctttatgcaaaatataatggccgcgggcaggctttttaatatctgggcgatgtttcattaagctcttcataaatgtcgtcatgtttttaatcggaaagccggtttctttctcgatttcagttttgagcttaatgcctttcaagccctcttcatagcggcttaaaatgtttatggcagcctcacgctgtatggttgtttttgattggaaaatagtatgagatggggtcttgataggcggatgtttgtcagcggcatgctgggattgttttaattcctctgctgcagcgcttgccaagtcgattaatgaagattttttgttaattgcaggctcactctcccgatccaattcacgcagcttcgaataaatgccctctcgttcttttcgcaattcccgcatcacctggatctccgcatcacctagctgttcaagtctcaaacgcaacgcttctctttcgttgaacatatctcccacatcctaaaattaagattccattatagtttataggacttttttaactttaacaatttatttaaaaataaattcaagaaaagttctttttatggttaacacatatatggaatataaaggatggttttgttcgtgatccctctatgggcagcacctacggcatgactgatgttcttgtatcaatcggcatatccttcgtccgtctcctccaaatcatatgatcgtatcccttcccccaataatctttcagcacatagtcaggctcgccgaatttcttcttccatattctctgggcaccgggatagccgctgtccaaacaaaattcatttactccctgattcaaaaaagtcaaaaacatgacgttcaacagcaaagtcccgattccgcgtctttgataatccgggtggacaaataccgttcctacctcatataaatcctttaaagctccatccgtacaaatgctgatcaattcgcttgcagggccatattcgatagtaccgatgattttattcagacgttgatctgaagcgataaaaaagtgccggctattccccttgctgtctaaatctgctttcaagtattgcctcttactttcaatttcactttctttatcatcgagcagatcggctattccctctttagcgaaggtatcctcgaccacaattctgaaaaactgattcagctcttcaacgtcgtcaattcgcggccttctgatctcaatatcgttcattttaaatcacttccctattcagtgatcgtcgtttcatttataccacggaatcttgtttaatttcattgtttccgcgttttcttcatctccggttttccattccactttaactgataatgcatgcccgataacatcctcttcaggcataaaatcaaaagtcgcgatatgatcttccatatggcctccgccatccatttcctctcccgtatactcggaaagatcgtattctcctctgtcatcatactttttgccatctatgtataaggtgattgttttcacgatcgttcttttcgcatcttcttccgtgccattccaatataaattcaaaaaataattaggcccgattgacgttttatccgatttctcaatcgaagcatgccacagaccgctttctcccgttccttcatacaccactttctttccaaagatcattgcactgacatatcccccgacgattaaaagcaaaattgcgctgatcatcagcagccgcttgagtctaatattgtttttcatcgtttcccccgctttcactacattagtagtaatgagggtgaaaaggttacgcaaaaaaaagcgccgtgaacggcgcctttttaaaatcagatttcccaggcagtatttattgcttttgcccaataaattgaatgacgtgggacaggccgttgtgcgaatctccttcatgacgaacgacttctcccataaaaaagtggacagtacgccaatctgaaaagatttgcaaaaattcttccggtgtatataaaagttctggatcctgcggcccgccgcttttgtaagggatttggtgcgtcgaatacacttccgttacgaaaaagcccccgggcttcacggctttttttactcccagaagcgtttttcggcgcagctcttctggaaaatgtccaaaaatacatacaatctcgtcccactgatcttgattccaagacgcttcatttaaatcaacaagctccgtctttactgatacatgacgggtttcagcaagcttttgcgtctttttcagtccagattcggcataatcccatgaagtgacgttcatcccttgttctgctaaaaaaaccgcattgcgcccctcgccttctgcgatggctaaagcatcgcccgacaattgaagttttttctgcgaatctgccaaaaacgcattcggttcagttccatacacatagttctcatcttgaaagcgcttgtgccaaaagttcattgttttattctccttttttggatgcttccatatcaatggtgttgtgattctccgttcatagccattgatatacccgcttcttttagaatatgcatttcattttcacatcgcagataaggtgtttttagcctttaggataaatcaatattttcttaatgggatcttaccaacaaagcttttcaatgaaatcctataatgatgttcaatatcacgtccaagttttttgcgtgaaatttccatttgttcggtgatgtaatcaaggtcgaatacattatataattgttgagtttcccaaatggtcgttagtcgagccttataatcaaatggtatcaatgaaataatgggttcgcccttttcatactccattgtgtaatatctatactccgtaactttgttttttttcttgttctttttaatccactcatttaaagaaacataaaattccaataaggcgatattttctttaaaatatgtaatttcatttattttgatttcaagttctccctctactctcattgctactgaagggccttttctcattttcattgggatatctgattcatcagatgtgaacttataatcaaatttcacttttgggatattatgtttagatcgaaacaaactgtctcaccactccgctcactttggcccaatattccggattagccattttttactcgcctttgaatgaatccttttccttatcatttgttcgcaaatgaacgataatcaagactacgcctaaaataagcagcagcacaggataaaataatacagaggattgaaaataagctgaagcttcatcattgccagctgcatcagttataacatgaggaatagcaacagataacaaccgtaaggtaaatagcatgacgagaccaagcaaaactgaaacaaatccggaaacaaagtacataaaaagcctcctatataatgatttagcattctggaaattgcccgcttattaataaattgaaattacttatgaagctgctttaatttttttcggatgaaagaaattgtatctaatgccagttttttgcgacaaagaacaattccggcatggccgcagttgtagagatgtctttcgggtttcccccagctttcccacaacttatcagcatcctctaagtgaacatattggtcatgcacggcggaaatcagcaaaatgttatctttgttaattttcggcgcagcttggctgggatctgtgatttcccaatatgtttttaaatcctcatatgtcacaccgtgctgttctaattcttctcttatgaatttacccgggatggtattccatatcgcataagaaagacgattagcataaaatatcgataccactatgtcgatttgagtctcaagggtagccagtaaatttgtcatccacccgcctaaactgacgcccactataataacagggccgtttttatttgctttgatccaatgaataagagcccgtaaatcgacgatagcttgtctcgtcgaatcaaccgtacgattcaaattcgcgcttatcatcaattctccgctgtaaagcgaatgttccggctctctttcaaaatgatatggaagagaatagtaatacaagttccagcctaattcgttcataatacgatcatgaaatatcttttttattctgtcgtatgaatccattcgccagccgtgcacaaaaataacattaggctgatctatatcatttttatttaaaaaaacctcgccttttaaagcatcgttgacagggtccccggatggaattaaagattcatagctgaaatgtccggccaaatggttttttcttgattcataaagcataatggcgacatcagccgcttttgctttataaaattcgtctctgtcaatcggattcaatgaaaaagcggaaaaatgttcatctttacttctttttctgtgcaaatcatataaggctaaacgatcgatgatctttgcaaaaaacactttttgccctcctgattggtataatggtgtttttttttgaaggcagttctgccaaggcctttcacacagaccattggccatctaatcggctgagcctgatgaacccgcgaagctgtcttgcaaagggactgttcgcaacaccaaatatctaagacaattatgattgctgcggcttatgggggagatccctgctttattttcacccagagaactgcattcaaacaagaatgctgttatagttgctctaaaaatgctaatagttctgaatcattaatttcaaaaattataaattgaatataatctattttgttcgtaccagggaaaagaaaatgatttatcgtaaatttcgtggcggatttccccaacatgccggcaatacgcagagcgatgtctacattttcaaaatcaatatcaaaggctacaaactcctggcattcttgattcacacagtaatttttaatctttgtattctttgggcttgacgggtttgacgcgcaattaagaaatttccttagtttttccggatcgaaattcatcaatagcccccttcaaagtatagtggatgcaactttcatgtagagtaaaggccattgcttaagatccttaacaatatgccatacaaattgttaggattaaagcaattggatacaaaaccgatgctaatttttgcttcttttcatcaatatgaatgaagttttttcgagataaaaatttgcgaatttcgggtaagaatatcaaaataacttgtgacaagaaagacagcttttgcatgagggtaagcgggctaaacgtaaacccgaatcctgcattacctcctatcgttgaccaatacatataaaaattaaggaaaggtatgacgaagcaaaatataagtctatattgattaatataataatcgcatttttcagcattaatgcctttagaagaaaatctaaatccgtagatgaaaagaaaaagtgtcccaaaacttaatatcggctgcttgataaaatacgcgaatacaaaagctattaataacataatttactcccttgcaaccatgattaataatcatggttaccatcatacaacaaaggaaagaatttctgaggccgaaatgatgaattcagcaaaacccgcactaaaacaaaagatcaactcatctttccacttttaaagttctggtacgatcttttctcatcatctccctacaatctttttccatatcgaaagtaagttactcttcttagctgcagtaaagtcggtgtttaatttgaattcaaacttttcattcatatgtctcggtatgacatgaaaatgcaggtgtttaatatcttgctgagcaaagtgaccgttgtctgagagtatcgtgtagtcatcacaaatacctgactgaattaataattgaggaactttaattaaagaatccattatttcattagatagatggggatcgtttatatgatccagtctttcaatatgcttatttggtatgattaatgtatggccatttgtaacaggatttatatcaagaaatgctgtcacatagtcagttttataaacctcaaaacttgaaattttccgactaactatttcacaaaatatacatttgtctatttcactattcatactttgttaagtgtccctctctttccggagtttttttcggatgcaccggacggctctagcctgatttcaccaggacgaccatcgtagtagatgtattcatcattctgttccctttaaagaggtgttgattatactgctatttccttatagaattgaacaaatactcagccttcttttcacttccatgcatgattctttcctcaagtgacacaacaataccgagaggaatagcttttgaagttgcaacgattgaaaaacagaaattcttattgcacagtaatgatcgaaatctttaaagatctgcgtttttttaacttcattaatatcactataattttaaggagtcagttggatgtttataaaatataatgaatatgatttactggaactttttgagagcgagccggtcagtatagctgatgatccagaggccggcgaattgatttatacttttaaagataatcaaaacttcaagttaattttaacgctggatgtttatcaactaacttgtagcctggatataacctataaagatttcttagtatttacaggtgtttttcaaaacataactagcattaagaaagttgaagatttcatggttataagtattggagaagaaaagagaataaaagtaaaattcactaagcaaattggagtagagttactttaagcttttaagttgtattgaaaaaactttccttagcgggatgagattgcatttaatcgagtgctgttatttatcttcgtctttctttagactcttctttttaaaagaacttataataacgtctttaacttaataaaacgaaatctcctcatagtcaatatcgttgatcaggtgtccaatagttgcaatgcgctcatcttctaattgtttaataaatttcatataatatgtttcccactcgctctttgcttcagagcagtcagcaacaatgtcaatgaaattgagaattccccctcttaattcttcataaaatacaattttcgcaaaaatggccaattcaaaattcccaaacgtagcaaaaagtgcgtcatattcgtcgtcaaacagacaccccgaatttagcaaatccaaataatcatgtagtgaaacaaaatgatcgcggatcagcaatattttttctgctgtgttttttcgttccatgatgcaatccaccaatttccgcaattcaatatcactcatgcgatcattttcatttaacattaacgctattggtttttctctctcttcaatttctctgatgatcaacattttgaagccatcaatttccgcagcgttatttaccctttgaataaattcattgcgatacaaattgatataatcagaaattgtttgatccgtctttaaatcccgctgtaaccgatcaaatgcattgttaattaagtttgcccttttatcagcatggcaatcacttaacaagcgacttaacctgtcatattgaacttcagaaattctgacttgattggcttcgcccccggataggagtgaaaaaacagcattgtttatcattaactcaaaaatattaaaaagttctatgcgataattaaaatgacatattattccaaagtttgtcaagacatacattaaatcgtgatggttaaaaaagtgacagaatctcgtttctatcagcagtcgctctaaatactgtttaatataaaaaacaccttgcagttccatgttgtcaatggctaaaggatagtcaatgctcgccatggtattttgagcttcaaaaataacattataatgattcataaatacaggtaacgattcgtcaatggttaaagtataagcatcaacaggcacatctaattttatttttttacgtcttgatataattgtttagcttcttcaaaataacagtgaagtaatgcgacaccttttgtatatatattttttatactatcagaatgtaaatgtactataaactcttcaggtttctcaaaatggagagcataagcatctattgcatacatgagggaaaccataatcccttccgccgtttccgttgtcaccgacatactttcccctttggtatactggcctatcaatcgttgcagaatttgcataatctctacctgtatcttgtatgctttctcgctggtaataactccaacactttggccttcttttagaagcgacaacatatattggctttgctttaactttgatttatcaatcgtaaaatttgaaaccaaatcatagcgatttaaagtgttttctttgtccatgttattcatcacctttatataaagactcacttctcatcgtatctcttctgaaactctccgcgagttcctccattttacttcttaatatctctaaagacccggcagaaggcccgttaaaacactccatcatctgatgaatcagtttcatgtcccctatcttatcttctgtttcatttctgagataataaaaaatctcctgaagctcgattaacgtttcgacataattatcctcatccatatagggtgaagcagcaaacacctcaattaattcctttagtacttcaatccccagttctatacgtccatgatcatgaagcactttatttctataaacgattaacatttttatatcgctgggtgttaagatcaggccatgctcttttgttttttcatttaattcaagtagctccatcataggttttgattgtggggataattgaatggaattcaaaaaacgagataagttcataaacctctcttcctttcaaaagcatctttttttaaaaaaacattgactttttataacttgtgtgttatgataaaataatattttttattaactatcaataatttattctatttacttacatatgtcaatagttgtttttcagcggtattgtttctttccctcttaaatcagctctttattcctcaagaccaattcaactcaacagatttctttcaaaatttttatctacgtatacttcattctgttaaaattgttgtattacttaacttttctaatttttttaatcttttgtcttagacccgtaaataccaccagtagacggtcccgccgctttctggccgtatagccgtcaataccttgctctcagaacagccaacgtttcctggacctgacgtacagtctctcctttcacttaattcacttgtcaccttaaagtacagcagcgagttggatgatttctttccatttgtactgacttttttcaaactaaaaaggctcagcttgcaacctcattttgttagccttttttgttgcatagtctctttctgttatggctataaaaggtttccatttcattttcgacaacaaaagcaataaagacatttcaataaggaactctatactagagagtaagtgaatgccagtgttcatagtgagaacttcgaaggaaatataatgtccgcgttgaaaataaacggttttgttcttcagtaaaagaatgaaatagacctgaagaaatcaaatctataagagttaaaatgaaataaagatgcttatttcatcgacatctcaatcctaaatgtggtaaaattgatgacaatgttaaccataaaaaggagaattatgcgtatatgagtattattattttggcatccatgcttttatggggtgcattaatttatgaactaagtaaatcttcaaaaaagcaaaacaaccgaaaaattgtatctttgatatctttgggctctttatcaactttagttattactatttcgctttttcaaaacctcccgttttaaaaattgtttataactatatcgatcgtatatgtcgtcggtgtggtatggttataaaaaaaatccttcttgcaagaaggattttttattcattattctcttctttattatctaattctggaaagttctcaattatcgatcgaatatcttcgacaaattctttctctgtatattgatcacccgcgtgttttagattatccagttttccgcaaataatcttcaggattccctttgcgtgctcttctttaaggccgtttactttgtttatattcctatccaattcaagcattcaaatatttcctaccctaatataacatgtccaccccacctagtatttagttcattaggtcacttttgccgcggcattccaagctgaccacgcttttcacgtggtattgctcttgaaatacaggtgctgacatcaaatatatcagtaaatagcgaccaaaatagaatgaaagattacgaggcaattatggagttagattataacttcacatttttttggtcataatttggtcaaagaccaaaaagaagaccccttacattcttttgaccaaaattcaaaaccccctgacaccgctggtgccaagggattcctagattaatactgagacatatactgctcgcgctcccaaggatggacttgtgtgcggaacatatcccattcgatttcttttgcttcgacgaagtgttcgaatagatggtcgccgagggctttgaccatgacttcgtttgatttgaattcttcgagagcgtctgcgagtgtcgcaggaaggtcgacgattccgttttcgaggcgctcttcttttgtcatgacatagatgttgcggtcgatcggagccggtgcttccagcttgtttttgatgccgtcaagtcctgctgcaagaagtacgctcaaggcaaggtacgggttcgcagaagggtctacgcttctgacttctacgcgcgtgctgatgccgcgggaagccgggatgcggattaacgggcttctgttttgcgcgctccatgccacatagcaaggtgcttcatagcctggaacaaggcgcttgtaagagttgacagtcgggtttgtcacagctgtaaagcttgttgcgtgcttgacgatgccggcgatgaattgctttgccgtttcactcagctgaagatcggcgtctttgtcaaagaaggcgttggcgccgtttcggaagagtgatagattgcagtgcatgcctgatccgtttacgccgaacaacggttttggcatgaatgttgcgtgcaggccgtgtttgcgcgcgattgttttaacaacgagcttgaacgtttggatgtcatcgcaagcgcggatggctccggcgtatttgaagtcgatttcgtgctgtccaggtgcaacttcgtggtgagacgcttcgatttcaaagcccatttcttcgagctcaagtacgatgtcgcggcggcagttttcgccaagatcagtcggcgcaaggtcgaaatatccgcctttgtcgttcagttcaagcgtaggctcgcctttttcgtctagcttgaacaggaagaattccggctctggtccaagattgaaatctgagaagcccatgtcttccatttctttcaaaatgcgttttaagttgttgcgcggatcaccttcaaacggcgtgccgtccggattataaatatcgcagatgaagcgggctactttacctttttcggcggtccatgggaaaatcacaaatgtatctaagtcagggtataagtacatatcggattcttcaatgcggacgaatccctcgattgaagagccgtcgaacatgactttattatcaagtgctttttccagctggctcacaggaatttcaacgtttttaatcgttccaagaatgtctgtaaactgaaggcgaatatattttacattctcctcatttactagtttaacaatgtcgtctcttgtatactttgccattcgtaaaactcctcctctaaaaggtaaatgtatatagcaatgcagttgctaacaaattaatgaaaaaacctggacatgtctccctggcggaatgtcgtccctctttggaaacggcctgcttggatgagctcgtttttcagcagttttctcagttcttcatccgacaagttgtgcttctctgcttttttcggcttgtcttgtttgtcttctttttgttcgttttctgttttggcgaaaatttgtttgatccccgccatgtttacaccttgttcgatcaaatctttaatttcgagcagcttatctacatcatggaatgaaaataaacgtctgttcccttcgcttcttgcaggaaataccagtccattttcctcataataccgaatttgccttgcggacagttcagtcagctgcatgacgatacctatcggaaataagggcattgagcggcgaattttatcactcatctcaatttcctccttttcttatataaatttattatatgtgatgttatataatgtgtcaactcgatgtaaggattctttacatgaaaatattctttattttctttacattaatccctgcttcatgagcgcatccacagcactgcatatcgcatttttcacatgggagtaggttaatccgccttggacatacgccacataaggcggtcttatagggccatccgctgataattcaatgcttgctccctgtacgaaagtgcctgcagccataatgacatcgtcttcatagcccggcatatagctcggatacggcgtcacatgggcattgatcggagaagcgtactgaatcgcctggcaaaacgcgatcatctgctgcggggtggaaaattcgacagactggatcaaatcggtccgcttgctgccccatgaaggattcgtcctaaagccgagcttttcgaggaatcgggctgtgaacactgctccttttaatgcctgggagacgacatgcggcgcaaggaaaaagccctgatacatctcctggagcgtgtacaacgatgcaccggcttcactgccaattcccggtgaagtcattctgtaggagcaggctttcacccatttttccttgccggtgatatagccgcctgttttggcgaggccgcctcccgggtttttaataagcgagcctgccatgagatccgctccaacatggcacagctcacgctcttctacaaattcgccgtagcagttgtcgacgaaaacgatgatgttttcgtttatttctttaacaaagcgaatcatcttctcaatctcatcaattgtaaaagacggacggtctgcgtatccttttgagcgctggattccgacgacctttgtctgcggcgtgatggaagctgccacccggtcaaaatcaacggctccctcttctgtcagctcgacatggctgtatccgatctggaaatccttcaaagaccccgagttttcctcgcccctgacgccgacgatctcttcgagggtatcgtacggtttgccagtgatgtaaagaagttcttcccccgggcggagaacgccgaataaagcgattgatattgcatgggttcccgagatgatctgcggtctgacaagggccgcttcaccgccgaagacgtcggcatagattttttccagcgtatcgcggccgatgtcatcgtagccgtagcctgtcgatggtgtgaaatgcgtgtccgatactttgtgctttctgtagctttcgagcaccctccactcatttcgttcactgatttcatcaattgttttgtggatctgtgcgatgtcggtttcagcctccaccgccgttttctttagtagatctccgtgttttaatgtctcaaacatgttttgcagtatcctttcctacatatacttcttcagctctcccaaaatgttttggtcagggagaatatatccttccacttcatatgcttcgcgatcttcgtcaaaaacggtgctgttcgtcattgtctcagacttgattctcgacaacagccttccttctgaagcgggaattctcacgtcatacggaacgagcagctcctttttcagatagtcttcaaccgcctgcttaaacagcggcaagtctccgtctattttggcgctcgtcatgatatgccctctccctgaagaagggatgaaatcaggccgcttccggtctcttttgttatagacggttaaaacaggaatatcgtctgcttcaagttcctcaagaaggcgcttgaccgtctcctcatggccctcgtagtcttcgtgagaagaatcgatcatatgaagaatcagatcggcttctttcacctcttcgagcgtcgatctgaaagccgcgatcaaagttgtcggcagatcctgaataaacccgactgtatccgagagcagcacgctgtatccgctcgggagcatcattttgcgggtcatcgggtcaagtgtggcgaacaaaaggttttcttcatagctgtcggcgtctgtaagcctgttaaaccatgtcgatttccctgcattggtgtagccgacaagcgcgatttgcagtacaccgtttttctttcttctttctctgtatctgcttctgtggcgaatgacggtagacagctgaacattgatttcatgaatccggtttctgatatggcgccggtcggtttcaagctttgtctcccctggacctcttgttccgattcctccgccttgccttgacaggttgattccctggccgcttaaccgcgggagggcgtattgcagctgtgccagctcaatttgcagctttccttcccttgtcctcgcgcgtttggcgaaaatatcaaggatcaactgcgtccggtcgatgattttcacgtcaagcgttgtgacaagcgctttcagctgactcggcgacaattcatcattaaaaattaaaacatcgggcgacagctcttcacagagcaccgccaattcatctacttttccttttccgatatatgtagcagcatccacacggttccgcttctgcgtgaccgtggaaacaaccgttccgtcggccgttttcgtcagcgcggcgagctcttccatcgagtatgaaaaacgctcatcagacacgtgcggaagctggcatccgactaatatggctttctctttcatgacttcctgttcgttcaagtgatcatgttcctttcttaacgttagtcaataagcagtactatcataacaaacgaagggagcggttgccagaaatcctcgaaaataaaaaaagaacgcgccattatacgtgcggcgcgtcttccttcaagtcgagatcctggcttttgatggttatcaagtcattctttaagtagcagtctcccatcagcagtctcatcgcctgcgaccggatggatttttcgatcaggttgcggacgaaacggccattgctgaacttcgcggggctgaccgtacttttgacggccatcagatggtctttcagcttccattcagcctcagggctgaactgatattccctttccgccatcatccgttttgcaatgtccatcagctggctgactgagtaatcgggaaaatcgatgctgatcggaaaccttgactgaaggcccgggtttaatgaaagaaaatgatccatttcccgcgaatatccggcgaggattaaaatgaattcgttgcgcttatcctccatatgtttgaccaatgtatcgattgcctccttgccgaagtctttctctccgcctctggcaagggaataggcttcatcgatgaacaggattccgcccatcgcttttttgattaaatccctcgttttttgcgccgtatggccgatgtactcaccgacgagatcggcgcgctccgcctcgatcagatggccttttgagagaacattcatttcgtaaaaaagcctgccgatcagcctggcgacggtcgtttttccggttcccggatttcctttgaacatcatgtgaagcgcctgttttccggccttaaggccttgttcttcgcgctttttattaacgaaaatccaggcgtagatttccttgatattgcgcttcatttcctccattccgaccagcgtgttcatttccctttcaatttctttcagaatgctgtgtttggcttcatttttttgcagtgcggcctgatattcggcttcagcctctgaattggccaaaacctgcttttgaccgttcaatatgatattgatttgtccgttgtttttataagtaacagccctttccaacacactcacctcaccattctctctttatatcctattcatggcgcgcttatgccgtgacagacgcccacatgactgcacaatccaatgctttttgacaagaacggggcaggtcttgttgaaacctgcgctttcccgagaaatactttattttttattgtattcaggtaagctgtgcggacaaaccaattttttcatcctgtttggtaaatgcttaacaggttgacatggcaaatcgggagaaagtggtgattgatgaggtccttcggggaatggagccaatctgtctgaagatgtgctgcaggcgctgctcggctctcccctgtttcacagcgggatcttcaccaaagtctttttgatttgaaggaaatgaaattcgccttttttgtcttcatgattctgttactgaacataatatagttatctttcgtaataataagctttgacccaataataggttctacccttattttcacaccattcaacaaatccctttgatcgttcttttttaaacatcacccagtcatccaacagatcttgataatagttaagtgcttcgttattgtttttccttgtttgttcacattctactttgttgtttaattgccgggacttagcaagaagtgctgtatcttctttaatatcgccaagatacaaatcttcggagatatgatgaaatgaataccaaagggcgttcaaattaatatcgattagagttaataaggatagttgttcattcccgccaccaagtctaagtgcattgtttaaataatcgacacggttttcaggatttaaaaacaccccataccacctatatggtcttgaatcttcaggatcactcttcatccatctctcaagcaaaggctgtaaaagttccttttccaatggatgaacgagtacatggtgaatatcatctgatgtttcaaataaagcaaacagccaacaagcaaaattctgttgtgcaatatcatcccatttctttgcttcatcaataaaggaagataatgctgtaaaggatttcttacgcaaccctttttctttgagggaacaaaactttttaaataatggatatgcatccaatctgtcatttttcaagatattatttaagacatttaccatttttacatctctctttgttcagaataaaaccgtaatctttgaataatcacagcccagccatatggtttgtggtttaaaaaaatcacaatccaacttcttatacatgtattttaaaaattcaatttttcctttttttatattcataaatctaaaaatattaacgaagatattcaagataaataccaaaaactctttattgaatctgaaaaagctaatgttagaaaatgtgttcaaaatagagaatttgctaaaaagattcttaaccaggctcgttttgagaaaattaaagatgatatggttgatcaataacagtggagccgttgttattcatggtcactatgatcgaattgattagtgtgtaacgcgtttgccttaattattaggatatatgccctgagaggaagttattatctttcccatctaaaatcatcgaggtgttgaaatcataaagaaattcaaatattgcacaagaagattttcgaacacacagctccctcccgtctattttgaactaaaaggccaattaagaatgcagtttatgaattagaccccctgttttaataaggggtctattttaattctggattaatcttttgtattttttgtagctttaaagttttcatgataaggactgtgctaatatataatgctggtattcccacaacaaaataaagcacacttttaggcataaacatatcataaaagtataaaaatagggctaccccaaaaaacaggacaacatatttgcttatgtttttcatcacaatctatcatcctttaaagtaaagatctatccttctaagggaaagtctattttaatatgagccagcccattgtgagctggtttgtatacttgactcgactgtcagcggcagtcgggtcttttagtttatgctttttacaaattaataaaccattgcagtgcttttgtttaacgaatacctctttctaaacagtatacttctcattaaatttcacttcttcctaattgctgcattcgagtcggtacttcagatgaagaaatgtaatgcgttaatatttcaaattatacatcagtaagtattttttcttttatctgatgggtgcataactttgggaaatgatatgcctcatattttaaagtgagaattctaatggattgaaatccacgggtaactttgggtgaaaaacgcgttaaattttcggaacttcaatcactttccctggtgacttttcaagtaaagcatcgggaatatgcgggttatttttttaaaacttaaaccgttgaacccttgttatttcaggatatattttgagatttaaactgcaaatttataagcttttgatatgtttggattaaaaaatctttccattcttctaaagcagatgctgaaacattgtctgggctttcgagcatacgataaccatctgcataatggaacattaataaccccgtaccataatcgcaattctcattctcaagaattgcttttggaacatcaaaaccactattccaattataattcgctgcaaaaacttgaagaatcacagggttttcaatatttctcgtcactcttactagatcgtctttatctgtattataaagcagctcctcgaggaacttaatatctttcttatccaatactgttttacctcctaacaaaaacactttaaatattagtcgaccaattgtttaagcttcctttcccaaagctcaactgtagcaccttgactaggatataaaggtagacctttctcttgtaatgctctattgatgaaattttatactcaacgtaataccattcatcaagaagctccacattatgtcatactttaagtagccttacagtacttttaatatggattttcagtagcattcaatagtgaaaggatgcgtaacaaatgtgttcctccaagaccttattcttctaacgttctaacaatgctatccagaaagcaagcggatattagtgattttgcaagactttatgaattcaaccccttcctaagtcaatgaatattttattactatcggacaggaatcggtcaaaaaccctgtctactcaacagaatgacaccttcctatcaagataagtaacatgccgcgttttaaaaaagacgaccagagatgcggtcgttatgttctataacagtttttgctgtgagtacctcttcatattgcccttgggactatattgatccagaaatattgaaactttaataacatttattattactttgaatctttattttttacttcctttaatatctccctaagcaactgttgggtttcctcgttttgtttacgatttatcttgttttcctttaccaatacgatcatgtaatataaaaataaaatgatagcagaaaatataagcaaattaggcagcagcacacttaacattttatatgtaaacctcctatttaaaaaagatgtccgttaaacgatatgaacaccttttttccactgaatatctttttttaatcccctttttgcttgaagtgaacagctgcactttgccgcattttaaaaacttgtttacataaaacgacttcttcaagcggctgttactgatcacatcaatttttaaaatgggggttttttatttcttcaaattttgacaaaaacagggcaggtcttgttgaaacctgcgctttcccgagaaatattttcttattgtattcaggtagctgtgcggacaaaccactgttttatccctgtttgccttttcggtagatcagccatccggccagaatgatcaaaaggcccgatgcgtcataagcaaagtcgaataagaggcggttcgggcttagctggttgacgtggtgaatctgaagaagatgatggttgatgatgccttcaaggaagttaaaccagcccgccccaagcaaagaggctccccaaaagatgtgctgcggccggctgctgccaagttcgcccctgttccacagcaggattccgccgatgaaaaggatgacgagcgaaaacagatggaacagtccgtcgctcataatttggtgagagcggtctgtgtccatgtacacgctgtgccattgaagcaattgatgaaagatgatgccgtcgatcatggcgatgatgccgacgccgaacagaaaaggtccccaaaacgcttttttgtttttcatatgatttggcctccttcacatgctaatctgttatgtacccgccggttaaaaagataaaaccggttatgtttacattctctctcgaaagcaattatcctctttttaccatagatgtcttgaaaagaaaaaaagctgatccgaaaagtaattcctctcagatcagcttttttatttatggaagcctggatgcccgcacacgttttgtttcagcttcgttaatggcaagtgtctcagggtcaatcacgacaccataatcctgcaatgctgattcaatgctgacaaactcgtttaagacgtcgtccagcaccttttccggttcacgttccagcggatttccccagcctccgccgcctgcacggtaaaattggatgatgccgcccacaggcattttgacttcaaaagccgtttcatcgatttctctggcttcgtctgttccatacccgacaatcaccttgttgcttggtgaatcgccggctccgcagaagccttttgttgtgtttcggccccctgccatcatgacgcttgtgcggctttcctttaagtgctggatttgaacatccaacccgggtgtgcctctccatcggcccgcacccgtaaaatcgcttgtatattcatgctttaatacacggctcgggtattgaacttcggtcatttcaatagatggaagaataactcctgtcataacaggaggataaagcccccatccgtccgtttcgtatgcagctcccgcaccgccggtatagccgtaaaaattcagattcacccacggcttgccgtcatcgtattttccgtgagaataggcgagaggaagcttatgggcgttcactccgacccgttttggcgcacattgtgaaatggcctgaagaacagcctcggctatttctgctccgacgcacgcagtcgcgtgtccgcacggtgccggcagctgcgggttcacaactgttcctataggcgcggttactgttaccggattcatatatccttcattgatcggaatatcctcatcacagcaagtcgaaataccgacaaaagcaaacgaagtcgtatttgagagcgggctgttgatgaagccttttacttgcggggatgaaccggtaaagtcaatgtgaagatcgctgcctttgacggtcaccgttgcgcgaaccttaatatcgcggttgccttgaaagtcgtgatcagcgaatgtttcaccgacataggtgccgtccggccagctgctgatttcatcgcgaaccctgttttctgtatattgaatccggttgtcaatggctgtaatcaccttctcggcgccatacttatccagcatcgtctggattcgggaggcagcgaccttgcacgccccgatcatcgcatttaagtcgccttcaagccaatgtgaaagccggttgtttgcaacgattaaatcgaatacatcccttcgcttttctccccgctcataaatttttaacggcggaatccgcagcccgtcatgccaaatgtcttttgagcgcggattgtaccctccggcaaccggaccgccattatcggccatatggcttcgtacagcaggaagcaggatcggcttgcgattataaaaaacaggcatgacgatcgtccagtcaaggctgtgcgagcctccatgatacggatcattcaccaggagaatatccccggggtgaagatcataccgaaaggcgtccaatagatggtccactgcgcctacgaccgcataaaggtgaagcgtacagccgggggcctgcgcgacaaggcgcgattttttgccggaaaggtcaaagacgcccgtcgtaaaatcatgcgcttcgttaaacaatggtgaacgggccgttctcgtgacagtggcgctcatttccctggcaaccgcatcaagagaaccgccgaccacctgtgataagataaagtcctgattgatcatagctgctcctccttttgagagtacgtaaagacgaggaggtcgccttttttcacatgttggtgtaccgtgctttcataaaaggtttcgtcatggtctcccgttcttgacagagacccgtattttcccctttcgctaaaaggcagaagaaggttgaaataaatatcgtcctcctggttaagcagggacacttccatttcctccccattgtccgtccactcccgggaaaccattttaaaaccgtggtaaagctccaattcctccgcagagacaagcatccgttggccaaataaagcaggcggtccgaagccttttgaagctgaaggatacccgggtgcgagaacgattgattttgtttcggctcctgtgccaagctccggataaaaaacggcctgcggacctggcccataaatcggcggaaattcttcacttgtgccttgtccgttttgaatggctttaaataccgctgcagcgacgaaatgtccggtaatgcttggagctagtgctgtagctgccggaaattccggatctagaatcgttcccggcctcgtcttcgtttgaaaaggttgaagcgttccttcattgatcggtatttcatcggcaatccttgcaagaaacggccaaacggcaaacgccttcgttaaagcggcaggtgaattaaccggctttacggactgctctgacgatccgctcaaatcgatctcaaccgcattctccttctttgaaatttgcacatgaattgtactcttgtgccctttggtaacttcaaactcctggacagcgctcatttctgtttcaggcagatgagagacatgatgctcaacccttttttggctgtattcaaacatgcttttgatcgatgcggccactgttttttgaccgtagctgccaagaaacgttttcaattgctgtttggcaccatgcaaacatgtatacatggcttcaagatccgctttaaaagaagcgggcacccggctgtttgataataaaaaacgaagaatatcagtctgcagaactccttgtttataaagcttaaccggagtaattctgatattttcctgccatacttcaaatgcatcgggatggaagccccccggatactcgccggccaaatcaatcatctgagcgcggatagcggggaagagtacgagctccccttcaaggaatagcggcgccgccatggtgagcgactgccctttcgttccgccgctgtatggatctgcgaccagcagcacatctccatctgcgatatcaaacgaaaaatagtcgaacagattttcgacactttcttttaatgcgaacaaatgttcaggctcgtattgatgttgaaccgcgattttcagctcattcgtaaaaatcgctgcagcaaatgcccggtcttgcgaaagcacaggagaacgggagattcgctgcaaattatccccgacttctctgccgatcgcttgcagctttctataaagaatttgagcttggatcatgcatttccacctcttgtcgcctgttgagcatgctttacttcgatgacacagttgcggtatgaatcgattagagcctcatgtcccgggtaaacaacaatggtcgtaccccattgctcaatgatggcaggaccgacaatcaggttgcccggctcaagcattgacccgttgaaaataggcgttttcgccggttcgatgtcaaaatacatatcgcgttcacctgttttcgcttttgaaggatcctcttgttcaaactgctcctccttaagctttaacggctctctgactcccaccagatcaagacggaggtttaagatttcaatgtcgtgctcagggtctttatgggcaaacattctttcatgaaggtcatggaagtctgccgccgttgcttcaagattcaactctgtaatccttcgcgtccttgacttcaccggtacggttacttcatggacttcccccgcgtagcgcatatcgataaagcgacgcgtttcatattgattggtgaccgattggcctccaagtttttcgcgggccgtctgttccatcttttcaaaatcggcgttcatcgcttgcaggtcaacgtttttcaaactttcaaagcgcgtcctgagctccgttactttaaggtttgccgccacatcgccgagcgcacaaaagaccggagcaagggacggaacgataacggttttaatgcccaggtcttccgcctgcttgcctgcatggatggctccggcgccgccgacagccatcagggcgaagttccttggatcatggcctcgctgtgtcgttacaaagtggactgcatttgacatatcactattgacgatttgtgagattgcaagcgcggcttccactgtcgaaattccgagcggttcggcaattcgtgtacgaatggctttttcagccagcgaacggtcaagcttcatttctccgccaaggaagttatcagggttgatatagcctaagaagacattcacgtctgtaacagtcggttcttctccgccccttccgtagcaggccggccccggatttgagcctgcgcttcgcgggccgacttgtaaagctccgccgctgtcaatccaggcgatgcttccgccgccggagccgatcgtatggatatccatcatcggcaaggcaaccctgtatctgctgatccaattttccgtcgtgatcgccggatttaatttttcgataaccgagacatcatagcttgttccgcccatgtctacggtaatgacgttctcgtagcccgatttttccccgataaaggaagcagccgtcactcctccggctggacctgacaaaaggccacccgcggcaaatttcccgctttgaatgacattttggacccccccgtttgattgcataacaaacagttctccagtaaatccgtcttcgcgaaaccgttcgtcaagatggtttaagtagctttgcatggaagggccggtaaacgcattgacaatggtcgtgctcacccgttcaaattcccgaatctgcggcagcacttcatacgataacgatacaaacatgccgggagcttcctcttgaataatctctttgacacggatttcatgtgaaggattcatgaagctgaacagaaagcagacagcaacggcttcgaccccctcttggataaacccgcggactgcccggcggacggcttcttcatcaagcttagttacgacatttcctgtatgatccagtcgttcaggaatccccacacgataccttcttgggacaatttgataaggagcttctaagcgcggagaaaacacgctttctttatacgcgcggcggaattcgatttcgtcccgaaagccttccgttgtgagaagccccacctttgctccgttatattccagcaaggcgttagtggcaactgttgttccatggacaaccaatggactattggctaatagatcctttacgtctattccgatgatttcagccatttttttaattccgttcatgacaccatcagactggtctggggttgaaggcgtcttcgtcgaaaccatttttccgtccttgttgactgccactaaatctgtaaacgtcccgccgacatcaattccaaatacccattggtttttttcattcatcattgaaaacctttcctccttatccgcttaaaaaccagacgattcctctgtcgcttctccgatttcgtaacggagatttaattttgtgaaaataaacgtaaagatgatataaatcaaaaatgcaagtatagtagagttaatcggcccgatgccgaacgttatctttgaagcggtaaaacctccgatgatcaccgaaagaatcgccgcaacattcagcttcgaataagttgttccagccccgaattgatattgttttttcttgatgacaggtgctgtgatccaatgatcggcgatcatgactcccgcaatcggcggaacatacaagcctaagaatgttaaaaatggcacaaacatattttggacacctagtaatgcaatgataattccgatcacgcccatgatcgccacaagtgctttcttaggaatgttcacaacattgcgaagccctagcgaaccggtatacaaattgttatcgtttgtcgtccattgtgcaaaaacgatgattaaaaatgctaaaaagcccaggccaagcttgctcatagcggcaggaatattcggtgttgacccgatatccggaacattcgcggcaatcgccattgccgctcccgcaacaagacagaacactcctccaaggaaataacctacagaagcgcctattcctcctgaaaccgctccttttgcatatctcgtcacatcaggaaaaacaaccgcgcccaatgcagcatttccaacgacaattgtaattccggcaaatatcgtcagaggatcccctgtcgggtgaaatgtcagcaagttatgccagcttcctgagtaattgacagcacttatgattccccatatggaaaaaatgacgactaaaggtacagcgataaagcttaaagcggcaagcccgcgatatcctataaacgcggtaaggatcattaaaatgccgccccaaacgatggcgacctcaggctttgcaagccaaacacccggaaacatttcggaaatggtcgtgccaaagaaagcaacctgccagccgaaccagccgattccaagcgtcagcgccaagacaattccaaaaaggctcgatccgtagcgaccaaaggccagacgggcaagaacggtagtcgatattccgtatttcgcacccattactccttgaaaaaagccatataccgcaagaatcagcatgcctaagacagctgctaaaacggcatgtgcaaaattcaatccctggattaatgcccctccagtcacaatcgtcgacaatgagatgatccaggcacagcttgtaatcgtaatgttaaaaatcgattttcttttattttcagggactgatgtaacagcaaaatcatcagcgtttgtataggaaggttttttactgttgttttccattttcatgctccttcgtttcatcatgtagattgttacaccatattggtatcaatcgttacccctcgctttaacgtattgccgattgtacatgccctttcagcagaggtgattagtttctttttatagtcggtcggaagatgctcaggcaatttaacgctaaccgaacatttttcaacacgggacgggccttcgggggctttagcggcggaaacagaaacggaaaactcatcctccagcacctctataccatccctttcaaacatcttttgcaaagaaatggtgatgcacatacctaatgaagcttccaacagctcaatcggtgtaagtccgtctgaattcggagtgaaagaccctttcgcctgcataccggcttcatgaaaaatcccaaactctccatttgttttttgaatagtagacaaatttaattccccctttggccaatcagtccgaaaaattcaaaatgaaccaattcttcagtcatttcatcaactgaaaacttaggaacataattcagatcatgctttggcccaaaaagccattttgatagtgtgcccaacacaagacttgttaacatggtggcctgcagatcagtgttatgggaggaatttagcattccaagttctgtagccctttgaatgttctttttaaatgcctgttcaacactgatcagcgcctcttcgattgcctccctgatttccggatcggcgccttgtcccttgactaataaaaatgtcattaagtttctattctcctgtgcaaacgtaaaaattcttttcataagcgctgtcgtggattggatcatatcatcggcaagagcaaacgtttgcctgtagccttgatgaatggctgcgagaaggttatctttccctctgcctatgatttccttggcgatttcttctttgcttttgaagtgccagtaaaaggttccctgtgcaacgccagcctgttttacgatatctgaaatttttgccgcgtggtatcctttcgtagcaaaaagctcaagcgcgatatgtagcaattcctctcttgtgtctgtattccccatgtatttccctcctcaccctaagccttgattgacaagtcagtcagttttagggcttttattcctattggatttgtaagaataatcttatacaatgttttttttctagtcaagttgctaacctttccatttttcgcacaattacaagtataacttgcttttttatctttttggtcaagcatcggctgctgttaattctttcatctacaactcgatctattttttcaagagatttacagtttcatcgactaactctaataaagtttttttatgatgtgatgaagaaactttttgacgatctaattcccgcagcctggaataaatgtctttccgctcactttggagttcgcgtatgatctgaatctcggcattgttcagttgctccagtcttaatcggagcgcctctctttcgttgaacacgttcccaccccctaacaaaatattacttgtagtgtaaaggacttttttcagtttaacaattcttctttcccaaaaatttgcctgttcaattgggtgagcggaattttgccgtgattcaaacttgattttttatacaaatatagaaatgatatgtagaaataaagcggctgttgaggaaagtattggctttgaatttcaatgtgcaggatgcaatggcaaaggtcgcaaaagaaaagacaaaagtgagctttacaatgactgggataccaaaggtttttgtatggcggatcgtaaaaatcaaagttattgtcccacttggctgttctaccgatttgcgctatttaatacataagggggcactctcaacattaagccgcagaggggatcacaataagcaatcttttcatcaatcaacacttgcatcatgaactccttttcgccaaaatacaaggtgtccttcaaaacagcaaggctttccgcagatttgaaataatcgttccaatcaacgcaaaaaggagtttttagaaatgatgatcattttaatactgatagccggcattttggccggaatggccattcccgttcaaacctcaattaattcacggctgggcatgaaaatcgggtcaccttacggggcggcggccatttctttttttgtcgggacgcttctcctgctcattgtcgccttagtgacagagcgccattttttgtctatcatcggacttgttccttccattccctggtggatcctcattggaggcggatgtttaggcgttttttatttaacttcaaatattttgttgcttccgcgtcttggatcagctctgacggttgtcgtcactctgcttgggcagatgatcatggctctggcgatcgatcacttcggatggtttcacgtacccgttcatgaattaaactttcctagaatcatcggcattttattcattatttccggagttttcatcatcaaaaaatattaaatagcaagggagttcatcacagatgaaaaacaaatctatgtacgtttttcttttcatgatgctcgggctttttgccggaatggcatccccgattcaaacatccattaattcagagctgagaaatgctatccactcaccttttatcgcttctctgatttcgtttttggtgggaatgctcgttcttctttttcttacatcgttcattgagcatcggcggttatttttaaacaatttacaaacagcaaaaacctttgtcacaagcagtccgtggtggctctggacaggcggaatactcggcgtcgtctttattacgtccaatattttgcttttgccgattgtcggagcgtctcttactgttgttttggctttaagcggccaaatgatcatcgccctcgtcatcgatcattttgggtggttcggaatccccaaacaccgcttgaacgtccagcgcattctaggaatcgtcctgatgatcacaggaattatgatcattcagcatttttgacgccagtcatttttgcatcttctgccggctggcattcacgcattaatttcatattacgcaattcgctttaaaatgaataaaagggcggaaaccgccctttatttcaaatttcacagcaatttagtttacataaaatttttattgtaaactatttttccgcaaataaaaaagccattttgttcaaatgacttaagtgctgcaattgccgtatgcaagtaagaaagttttaaaccacactcctcaaagtgggtgtctgcagaaacgttcctgtcgtcctttcgaggaaggcatgacattccggttccgatataaaactccctattacagcttaaaggttaaaacttaattatcattacgtacaatgcagcgtaatttattatatgataaaaacattaatcatgcaacccccttgcctaaagatcatattgcgttctataataagctgaatatttaaaaaattccgttatcaggtgacaatcgtacaacccttcccatacatcagttcatagactgtttattgaggtgatgtcttgtggtaaaaatttttatcgatcccggccatggcgggactgatccaggcgcttcagccaatggtttgcaagaaaaacagttaacattgcaaatcgccttggctttaagaaacattctcctgaatgaatatcaaaatgttacagtccagctgagccggacaagcgaccaaaccgtcagtctgacgcaacgcacgaacgccgcgaacagctggggggcggactactttctatcgattcacatcaatgccgggggcgggacaggtttcgaggattacatttatcccggcgtcggcgcacctaccaccacctatcgggatatcatgcatgaagagattttaaaagtggttgatttcagggatcgcggcaagaaaacagccaattttcacgtgctaagggaaacagcaatgccagcactgcttacggaaaatggctttgtagacaatacaagcgacgccgagaaactgaagtcatccgcgtttattcaatccattgcgagaggccacgccaacggactggcaagggcatttaacctttcaaaaaaatccacagccctttttaaagtgcaaatcggcgctttcagggacaaagccaacgccgattcacttgccgctcaagcgaaagcaaaagagtttgatgccattgtaattgacagggacagcctttacaaagtgcaaattggcgccttttcttcgaaagagaatgcagaagcgcttgttcagcaagccaaaaacgccggatttgatgctttcatttaccaggaatagggacaatcatcaagaaaagcccgcgatctgtctcgtcgtaagcagcacgcgcagcgactggttgtcgagctccatgaactgttcgcacagctgtgtcggcaggaacgtgatcgttattccgttctcttcgaaatattcattcaaacgcgtaatgtccatccggatcgcttcatcaatgatatgaagctccgctccggcgatccagtacgggaacatctcccagacggaagcgtcaaagccgaagccggcatatttcgcgcttttgtcctgttcggtgaccgcgaatgcatcgttatgccaatagcacaagttcacgagcgattgatgttcgaccatgacgcctttcggctggcctgtcgtgcccgatgtgtaaatcaagtatgccaggttgtttggctgtgtacctgcctgcgggttcacttcatcatcatttgtgatttcttcgctcagcatcgaatcgagaagaagcgtttcaccgctgaattcttcaggtacggctaagtttgtttgcgtcagaagcagttctgcaccgctgtctttcagtacgtatccgatccgctcggccggatagccgggatcgatcggtacataggccgctcccgctttcaaaatcgcaagtacgccggccgccatttccagcgaaggcttcaccatgattccgacccgctgctcaggaccggctcctttttcaatcagcaggcgggccagacggttggcgcgcgcgttcagctctttgtacgtccacttcacgccgttgtacaccgctgccccgcggtcaggagtgcggaggacttgcgcttcgaacagctcatggaccgttttgtcctgcggcacagcgagcttcgtctcattccacttttggacgatccgccgtttttccgcttcatccagaagcgaaaggtctgaaagacttgcatccggggtttcggcaaccgcttcgagcaggttgacccagtacccgctccagcgtttgatcgattcgcgcttaaagagatctgtattgtattccatttcaaaaacgagaagtccgtcttcttccgccgctgtcaacgtcagatcaaatttcgcagtctgatgggcaaaatcatacggtttaagtgtgactccttccattgacaagtctttcaaatcggcattttgcattgaaaagacggcatcaaataacgggtttcggctcatgtcgcgctggatgttcagcttctcgatcagttcttcaaacgggtaatcttgatgctcaaatgcgccgagcgtcgtttcttttacttcctcaaggaatgcagaaaacggcttgtctccttcaggacgcgttcttatcgcaagcgtattgacaaacatgccgatgatacggctcaaatctgcatgcggcctcccggcagccggagagccgaaaatgacctcgctctgtccactcagtttcgataaaaacgtactgtatgaggcagcgagcaccatgtataaagtgctttccgtttccttggccagtcttctgagctgctggacaagctccggtttcagagaaaagctgatacggcttccttcaaacgtttgaacagaaggacgcggatagtctgtcgggagcgtcaaaacaggcagttcgccgtcaagctccttgagccagtattcctcctgcattttgtgccgttcagtgagcaagtgctgctgccatacagcatagtctttatactgaatcctcagcggttcaagcgcctctcccgcataaagccttgtcatctcatcgatcagcacgctgacggaagcgccgtctgaaatgatatgatgcatatcgacaagcaaaagatgtttttcttccgtgacacgtatgatgctcattctaaataacggagcctttgttaaatcaaacggcctgatgaactctttaatcagcttttccgcttcttgttcatctgcatcgatgacatcaatggtcaattccgcagcttcccaaatccgctgaacaggttcgccgttcctgatttcaaacgtcgtgcggaacgcttcatggcgcttgatcagcatttgcgcggcagactccaggcgcttcaggtcaagctttccttcaagttggagaacggccggcatgttatagcttttctcagcgccttcaatctgctgaagaacgtacagccgtttttgcgccgacgaaacggggtacgtttcccggtccggcgccgcttcaatataaacggcagattttttctcagattttgccgccgcctgggccaggctttcgattgtcggcgcctggaacaagtctttcagctgcaggtcaacattcatctcttgctggatgcgggcgatgagcgtcattccgagtaaagagtgtccgccgagttcaaaaaaattgtcatgcacaccgattttcggtacattgagcacctcctgccaaagatcggcaagctgcgcttctgtgccgctccttggcgccgtatattccttttgcgcggcctgcgcgatatccggttcaggcagcgcccttctgtcgatctttccattgcctgtgagcggaagctcatcaagctgcataaacacagacgggatcatatagcctggcagaccttctgccgcatgtcggcgaagctcttggctcgaaagctcctgatcagccgtaaagtatgcacagatcatttgatctcccgccccggtgtcaacagcaagaacagcggcttcctgaaccatgtcatgcgttaggagatgatgctcgatttcgcccagctcgattctctgtccgcgaattttgacctgatgatcaatccgaccgataaattcgaggcatccgtcggcaagccatctcgccatatcacccgtccggtaaatcttttcgccggttttgaacggatgcgccgtaaacttttcagccgtcagttcagggcggttaaaatagccgcggacaaggccgtctccgccgacgcataattctcccgcaacccctgccggctgtacattgccgaatgaatcaagaatcagaacctccgtattgctgacaggctttccgatcggtatagcctgcgcatcgtccggcacttcattgactggatggtaggttgtaaagaccgtgctctcagacggaccgtacatatgaagcagccgccctctgccaactgtcttcagggctcttctgacatgatcgacagatgcacgttcgccgccgaacagaaccctgcggagtcccttcaaactgtccggccgcatgtctgtcagcagattgaataatgcggtcgtgatcattaaaatcgtaatcttttctttttcgagtacatgtgcgagccggctcatatcaagaatcgtgtcttttggagctatcaccagcttggcgccgttcagcaatgaaccgaacacatcaaacataaaggcgtcgaacacataatttgaaatcgaaagaacgatatcggattccatcacttccaagtaattcgcgttttttacagtacgcaaaatattccggtgagagaccatattgcccttcggcgtccctgtcgttccagatgtgtacgttagatttgccattgcttccggagaaatcggaaggcgcaaatcagacgcatctcccatataaaggttttcatcctcaacaaataggatgtcgccgccaaattccgccgcctcagcgagcggcttcatcgccttttgcgttaaaagaaccgccgctccgctgtccttgaagaaatgttgcacacgcttttccggatgatcgggatcgatcggcacataagccccgccggctttcagcacagcgagaatgccgatgaccatttcagccgacctggccgtaagaatggccgccgtcgtgccggcttgcacgccactttcgcggaggcgccttgccaattggttcgctttccgattgagctcatcatatgaccatactttgtcttcaaattgcagggcgggataaccgcctctttctgcagcctgttcctcgaatagctgaacgatcgttttctcccgcggataatcgcttgtcgcggggttgaacgcgacgagctggcgattcgtttcttcttctgtcaaaaggctgtactcgccgatcctgagcatcggatcagccgccatgtcctccagaaggttcaagtatgctttcagcatcctttcagccgtatcttttttaaacagcttcgtgctgtaatccaaatcgagtatcaattctccctgctcttcttttgcctgcagcgtcaagtcgaattttgcaatattgaagttcgtttcataaatcgagaggtgcaaatcgccgagcagcggaatgtcttcccatgcattctgcaaaataaacatcgtgtcaaagatgggatgacggcttaaatcgcgcgatgcgccaaacttctccgcaagccgctcaaacggataatcctgatgctcaaaagcatcgattaccgttttctttacatcattcaggaagtctgcgaacgttctgcccgggtccacttttgaacggatcgccagcgtattgacaaacatgccgatgattccttccagatcggaatgtctgcggccggccgccggcgtcccgacgatcacatcttcctgcccggagtactttgcaagaagcatgttgtacgcagacagcatgaccatgtacaatgtcgcgccgttttgctctgccagcacggctaatttttctttcaggtcttttggcaggactgcggataccctgtctccttcaaagctttgaacaggcggcctcggctcgtccgtcatcagctgcagtacgggaagctcgccggcaaacatgctttcccaataggcctcttctttttgaaagccttcttgtgcctgcgccctttgccagaaggcataatctttgtaatgcaaacgcagctccggcaattcctccccgttatacagcgcggccagttcattcaatatgatcgaaatcgacacgccgtcagatacgagatgatgcatatcgaacaacagcagatgtctgccgtctgcaaggctgacgagacccgctctcatcagcggagctttggcgagatcaaagcggcggacaaatgatttcgcgatttgttcgatcggcttgccttccgccttaaccttctcaatcttgaactgaaccctttgatgaacggtctgcctcggctcgccatccacaactgtaaacgaagtacgcagcgcctcatgcctatcaatcagtttttgaaaagcagcttcaaggcgcccagagtcaagagtgccttcaagcatcgccgcggccggcatattgtagccgacaccctccagctggctgacgatatagattcgctgctgcgccaatgaaagaggataatcgtcactttccggcgccggttcaattaccgcgaatccgtctttctcggcttcagaaacaaagccgctcagcgccgctactgtcggcttttcaaataggacttgcaacggaacttcgactccgaaagctttatgaatttttgccagcatggtcatcgctttgagagagtggccgcccagatcaaaaaactggtcgtggattccgacttgttcagctccgagcacttcctgccatatacccaccattttttcttcacattcatttctcggcgccgcatattctgcagtcccgctgacagacacctcatggcgaagcagcgctttccggtcgacttttccgcttgccgtcagcggtatttcattaagctcgacaaagcaggaagggatcatataatcaggcaggtgtttggataagtgctccctcagtccctgaatgtgaatctttccgccttgtttcggaacgacataagcgcaaacctcaaggctgccgccggtttcatgccgcgcgaggacaactgctttttcgacagcaggggctccttgcagcaccgactctatctcgccaagctcgatccggaagccgcggattttcacttgatcgtctcttcggccgataaaatcaactgtaccgtcaggaagccaacgtgcagtatcccctgttcgatacatgagacctccggatacaaacgggtctttcaagaacctgtctctggtcatgtcaggcaagttcaaatagcctcgcccgactccgtctcctgcaatatacaattccccttcgacgccatcaggaaggagtgcgccgttttcatccaaaatataaaaacggttatttcctatcggccggccaatcggtacataggccgtatcgtattgaagatctgtgcggtttgtaatcgtaaaagaagaggcatccacacaagtttccgtcggtccgtaaacattcgtaacagcaggcacggattcagctgtttctgcaaataactgaagcagcctttccgtcgcaacccttgataaagcctctcctccaacaagcatatgcctcaatttgacgcctgaaagatcatcagccgcagccaaaagctgcaaatgtgccggtgtaccgtctgtcacatcgatttgatgccggcggtaataatccgataaagcgcgtccgtcggaaaccgtctttttcggtacgatgtacaacgtttgcccgagcaatagagacgtaaaaatctgctgaacggaagcatcaaaatgaaatggagccagaagcgccagtttcaaatcatcctgatcgtatgtaccaacggcctgttgaagtcctctgacaaggtggtggacctgcctgtgttcaatcatgacgccttttggacggcccgttgtaccggaagtataaatgatgtatgcaaggtgcccggcgcctgccgctgaagacggatagccgttttcccgcgattcagaaagcgcttcgctgaactgcaccgtttcagccgtttcaaaagtcagcccgctgtctgtgataaccgctttcgcctttgaatcctccagcataaaacggattctttcttccggaaatccaggatcgatcggtacataagctccgccggctttcaaaacgcccatcatcgccgtgatgacccgctctgaccgctccatcactatcgcagccggagcatcaggcccgatgcctcttctccgaagcgccattgccaagcggctcgattgttcattcaactcccggtacgaaagtttttgtccttcatatacaaccgctgttttttcgggatgatcggctgctttttgttcaaataaaccgtgcagggtcatgttcttgtcatatgcaatggtttggcttgatgcacgctttaacagccgctctttttcaaaagcgggaacaatctccagttcagcgattgttttttgcggagacagcagggcatcttcaagcagcgtcatcagccgttcatataacacggccatttcttccgaagtaaaaagctcctccctgtaatcaaaatcaatcgcaagcgtcccggtatcccatctctctttcacatgaatggaaatatcgtttacttcactgccgctgaaaatcggctcggtaagaaacgacaccgtttctttttgctgccattgcataacctgatattccagtgagacggcgaacaatttgctgacatgcggctgtctttcccgcaaatcattaatcagcagattgtacggatacttttgatgccgaatgattttcagctggtccttcattctttcctgcacaaatgcactaaagtcttggtgtacttcaatggaggctttcatcggaatcgtcgacacaaacatcccgagcatctgtttttcttttgcatttgtccggttacccataaatgttccgagaacgacgtctttttgtccggttacccggtgcatatagatgtgcagaatggataggaacagggagagtacactgatgttgtgttcattacaatacgtttgaatttttttatacaggtcaggggaaatctcttttgaaaagcgggctgcatccaattggatctgatacgtatcgctcgcttttaacgatacgggctccggaatcgcttcatattgtgcgttccaatatgctttatccttctggaaacgcttcgaattttcatactccaattcgctctggatatgttccgtaaatgatgactgtacaggttcaaggtcggtttcccctttggcaagcttcaaataaatatctgtaatccggttgcctaggatcgtcatagaaatgccgtcggaaatgatatgatgaacttttgcaaaaaaccagctttcttcttcactaatgcgaacaacggcaaatttaaacagcggactgtcatacaaaggcaggggccggcgcgcctcagcttgtccccatttaagaacgccgtctgctcctccgctttctgaagcatcaaaatattcaatttggaaaggttcgtcttccgctatatactgcttcggctcatcctctccttcaaacatcagcctgaatcgcatcgtgtcattcgtacgaacaaacttgcgaatcgcttcagtcaataacccggaatcgattccggatgcagattttaattttccaaagccgctcaaatttgaaacacttgtaccgggatagaacttttccgtgtaccaaattcgcctttgagcatgtgtcagcgggtaaaatgtgtttcccattctttattcctcctttatctcttgttatgtatgacgatgcgaacagccaagccgcaatgcaatgttgcggttttgcgatgagcgaaaaacgctgtcacagatttgtcgtttccaataaaacattatattggaaataaaaagaaaagagcccgcccgaataaaaacgggcgaactccctgtttattcggcaacctgtcaaccgtagcaccgtcagcaccttaggccatggctttgcgtccctgcgtttccgcaggtttgcctttatctgcttttcttgatataaattcattttctgctcacagttaactttaaatgaaaattttgtttttttcaccgaaaaataggtgaaaagtttcatgcgggataccgaatgttgtacatgaatgttaatgcgcgatcccgaaatcgacaaaaaaatatgcgggaaaacgaaaaaaatcgtttaaatccgcaaaaaattccaaatcttagataaagagtatattaaaatattaaaaaaacagcatggacttcataaataaatcatgaaggtctgttaaagcttcggcgcttccttttacaatgttcattcaattaaaacgtttcttttaccaggccgtttaaactgacgagaaaagacaaaccggcttgcgaaaacattgaagcagaatgttaaatttgctgaactgtctcattctgaacggtatcttgaaatacttccgatgctccatacaaaaaagcaggctgagtttcgcctgctacatggtttttgagagcccgatcgtccgttcgatgatgatcagcgcaatcactgaaaccgtgataaaaataaccgaaatcgcatgaacgctcggatcaaatgtctggtcaatatagctgaatgtacgaaccggtacaggcgtgacagccggtgaagaaacaaacagactgattgatatttctccgaatgacgttacagaggcaaaaacggctcccgcaatgattcccggtttaataagcggcaagatgacatgaaaaaaggtatgccagggacctgcgccgagattcatggatgccagttcaagcttctgatccacgtttgccatgctgactccgaccgtccgaacgacatacggaaggctgatcagcatatgcccggcggccagcccggcaaacgtgccgtttaccccaatcattgtcaataaatagagaaatgatacgcctaatgcgatttggggaatcatcaacggcgataaaacaaaagcctgaatcgcctgttttcccggaaagttcagccgcgccaatgcataggctgcaactgttccaaggatcaccgcaagaggcgttacaacgagaagcagcataaagctgacccaaatcgattccatccagccgctgctgctgaaaactccggcaaaccagcgcagcgagatgcctgatggcgggaacttcggatattcgtccgggctgaatgccgacagtatgatcacgaagacgggcagcgccaaaaagaagtataccaataaacccgctgtccaaacacacgcatcaatccattttcccctgcgcatacgtcgcaatcgcctacccatttattctcgcctcccaacgcttttggaaaatgccaaggattccaataaccacgctgacaacggctaataaagtaatcgacattgcggctgcaagaggaagatgaaagacttgcatgacctgctgatagatggacaacggcaggagcggctgcatccttcccccgacgagaagaggcgtaatatagcttccggcagaaagcgaaaacacgatcattgctcctgtcagcaatcccggaaccgtcatcggcaaggtaacgaaaaaaaatgtccgcagcctgcccgctccaaggctcatcgaagcaaatttaagatcaggtttcacttcgcttaaagaactggcaagcggcagtactgcaaacggcagcataacctggacatatgcaatgatgactgcgttcatattccataaaagcggcaggggcttttcaatcatcttcatactgataagcgcctcgttgacgatcccgttttgcgaaagcagcacaatccaggaaaacgtccgaatgacaacactggtcaataaaggggaaacaagcaaaatgtaaaacaaagcccgcagcctgccggttggcgccttaacgagtaaatatgccgccggatacgccatcacaaggcataaaacagtggtcttcaacgccgtccaaattgttataccgattgttttcaaataaacgtctgaagagaacacctcgacatattgagaaaaactatacgtatcgagcgtattcatcatagcgtccacgtctctgaaacttaataacagcagcagaacaagcggcaaaacaagaaaaacaccgagaaataaaaggacaggaactagcaaaaaccaataaaaccgtttttgttcaacagccctcatctgcatcctccttaacatccagcggaacaaaatcgcccggctccaaagaaagatacacttgatctcccgccttcggcaatctagggaattgaggatcgggcgcctgaatgatccattctcctttgaaaacagcggctttcagcctgagatcatgcccggcgtaactgacttcggtaattgttgcaggcatttcaatcagcctgttcttttgcttctcgaaggagactgagatcctctcaggccgcaccatgaacaatacagaagttttttttgagagttcctggttgatttcaaatgtcagcggaacgccttcatacacttcgaaatcgaccgtttcgtatccatagccgcccgatgaaggctgtatcttcgacgcacgcgctttcagtaaattgacctgtccgataaattcggccacaaattgattggcaggcgtgcggtacacgtccaacggagtgccgagctgctgaagcctcccgcatccgagaattccaatcctgtccgataagcttaaagcctcctcctggtcgtgcgtcactaaaatcgttgtaatgccgacgcgcttttggatgctgcgcagctccgtctgcatttcttttcgaagtttcgcatccaggttgctcagcggctcgtctagcaaaagcacagacggctgaacggccaatgcccgggcaatcgccacccgctgctgctgacccccgctcagctgatggggcatgcgattagcaaacgcttcaagcctgacaagagcgaggcattccatcacccgttcttcaatcttgcggcggggccattttcggactttcaagccgtatgcaacattgtcaaaaacgctgagatgcgggaataaagcataatcctgaaaaaccattccgatatgtcggtcgtatggcggcaaatcagttacatctcgtcctcctatatatacaaaacctgacgtcggttcaaggaacccggcaataatattcaggagcgttgactttccgcagccgctcggaccaaggagggagaaaaactccccttctttgacttcaagctgtacgtcttccaatgcgatggtgtttccgaaatgccggctgacatgcctaatctgaattgcgctcatgtttgtcacctattttccgccaagtacttgattccagcgatttgtccaatcgcctagatcttttgccgcgacttcatagtcaacccattttaaattcctgtaataatcctcccctactttgatcttcccttttaatttatcgctgtatttcacttttttattggccatgccgtaaaacgttctatcggcaaaatctccttgcacttctggactgagcagatgatttaacagcttgtacgcattatcctgattaggacttcctttcattaaagcccagcttgcaactgctgcgactgcaccttcctcgggatatgcaaatcccaggtcaagacctgcatcctgcaaagaaaaagcgcggccgtcccaaaacggaacaacccatgcatccccacgttccagaagcgtttgtatcgagcctggattatcgggataggccgttatgttgttctttaaatcagccaagctgttgaacgctttatccacgtctttcccgtttgactccaggccgccctgggcattgattaatcctacaaaaaactgaagccccgccgaataagccggcgatgatatggcgacatgacctttatagctgctgttccaaagatccgtccagcgcttaggctcctgtggtacaagatcctttcggtagacaattccaagctgtcccatactgaaaccggccgcatactgctttccatcatcggtgaagcgtttctgaacagagtggtacagatcgcggacattcggaaccttttcctgatcgatcggtgccagcaatcccgccgactgcgctctgtgaatcgtgtccggctgcagaattaagagatcatagggagcatttctgccattcgatgccttgagttttgtgaaccactcagagtctgtccctgcgacaactttgaccttcagtcctgtttctttttcaaaagattcgaggctcggcttgatatgtttttcccaatcgcccccatagacgccgataacgactgtatctgattgtttgctttcctgacttccgtttccgccgcatcccgaaaggaggagcaccgctgcaagagacagaataaataaagcagaaattttacttttcattgtcatctcaccattcccgtgttattttttccagccagtttttccacagcggccgcaacttcgcttttactgatcggaccgttatgttcttttgagaaataacgatggactaaatgtttaacatgtgacctttgatgagccggaagctgtcgcagaagccgggccaatgtgctgctggcttcttctgtccagcaccgttcgtattcttctctggcgattccgaaatcccattgtttccgatgttcgcctgctttcttttttctgatttcagctgtttcttccagatcaataatgaaggagccagcgccgttttcttttacagcaacgccgtattgatgatatgccgcttccgggctcagcaagcccgcttcaacttctcctaaaatcgattcagcttcccggcggaagggatttccccagcctccgccgcctggtgaatgaatgctgataacatcccctttattgagctttagaacatcgatcttcgacatcgttttctcctgaggctgatcaggataaaggcgcacccgcccgagcgctcctgccgttcccccggcgagcccccacggatgaaaacgcatcctctccatccctcttgcggtcacaattgattctggtgccgccgcttcaaactccagcccgattgcatggcctcccctgtgaaaaccggctccggctgtatttttgatcaattcatagcggcgaacatggatgtcgatgtgctgttcaaggctttcaatcggcgtatttttcaaaaatccggaggcatggtcaattccatctgctccgtccatgtcatgctggccgcctcctccgcctcccatcggttcgaccaccgacatcttcctgctgccagttgattcatcgggaaccgacagtacgacaatcgctgactgaccggcgcctgctgcaggcacggctttcggaagcgcctttgccaatgcgcccagtacagcattataaagtctcatcgtgatcgaatgacgaatgccgaccgccgcaggatattccggatgaaccagcgtaccctttggagcgataacttggatcggccgtgtcagccccccgttaatcggaatatacgggtcttcacttatgatatagttgatcaggccctgatatagaaatgaatgtttgcttccattggtgacaaggttaaatgcggtcttcacctgaggatcacagtctgaaaagtccaatgtgatctcccctcccgagacgtttgccgtaacagccaagcggatcggaacgtcagaaaccatatcgtcatcaagataatctgaaaaactgtatgaaccttccggaatcctgctgattacccgtccggctctcatcgcggcttgttcgagcaaatcatccattccttgttggaccgcttcttttccaaactttccgaccatttctgtcaatcgattctccgccgtattgaccgcggccaccatcgcatgaatatccccttcatttaagtcgggaaccctgctgtttgcccgcaaaaccttcaatatatcgcgattttctctcccctttttgtaaatccttgccggcggtattctcaggccttcctgatggatgtctgtcgcggtcggcgaaatgcttgccgggacaaggccgccgacatcgctgcaatggacaaagcaccacgcgtaactgattatctcgccctccaagaaaatcggcttcaccacatgaatatcaggcaagtgggtcgccaatccgtccgttgtataaggatcgtttgtgaggataatatctcccggttcaaatgggccgctttcttcgatgacccgttttaatgaaagccctaaaaaaatcgtgacgccgaccgttttcggataaacgaaaaactccccttccggcgtcgcaagcgcagtagcgaaatcagccgattcttttacaaatgtggtaaaggacgtccgttcaataacgtgccccattcccgcggctatcgcgttaaagtagcttctcatcatttccagccgggcaggatctgtgcgcatggtcagctctccttccgttcaatgatcaaatttccggcatgatcggttttcccgctccaatttggcaaaatcagcgtcgttgtatcgtcctgctcaacaatggccggcccatctattctctgcccgctccttaaatctggacggcggtatacggaggcttgatatgtaccgcctttcatgatgatctttctttggctgacaggttcagcttcgggcagattactttgacatccttttccgcctggcggtttcggcgtcttgcctataatgcggacgcgcatattcatcaattcaatgcttgctttcccatcgctgtgtccatattgcttcccatgtaagagatgaaaggagtctgcgatttcactcgtactttcgccttccagccattccggtgaaacagggagctcaatttcatacgcctgacctttataacgggcatcaagcaagtaaagaagagaggcttcagtcaccatgtccgcccgttgtttccgcagccatgtttccgcctgttcttgcagcctcataaactccacttttaactcagccgtttttatttgctcaagcagcacctgtcttgaacatacagcatcgtagataaaatcagccgtcagtgcgcccaaagccgatagagttcccggatgcggcgggatcagcacatttttggcctgaatttcctcagccaaaaaattagcagtaaccgggcctgcgcctccaaaagccataaggctgaattcacgcgggtcaaacccgtgttgctccatgacattgcttagttccgtgtacatattggcaagcgcaacttgaatcatcttatccgcggcttgctccacatctgtgcctaaatactcggcaaccgggaggagcgctttttcggctctttcccggtacagtttcatatttcctgctgcaaacctgtttgggtttaaataatgacatataagaaacgcatctgtaagtgcggcctttgttccttttccgtaacaggccggccccggatcagagccaactgactccggccctactttcaagagaccgccgctgtcaatccatgccaccgatcctccgccggcaccgatcgaatacattgctacagatggaatcgcaatcggaaatcccgagatttgatttgactgggtaaaggtcggctctcctttttcaacaatcgaaatatctgcgctggttcctccgacatcaaaggtgatgatattggcctcgccggcggcttccgccgttctgatggatcctatgacccccgctgccggtccggaaaaaagcgttttgacaggtgcctcggcagccgattcaatgtccatcagtcctccgttggactgggtgataaacggctgcgccgatattccttcctggacaagcctctctttcagcgttccaaagtagtgatggatattcggtttgatgtatagattcgcgacggacataaccgttcgttcgtattctctcatttgcggccaaagctccgcagacgttgccacctcaagctcgggcgctatttgcctgatccgttcggcagcctggcgttcatggagcggattccgatagctgtgcaaaaaagaaacaacgattccttttaagccttttcttaaagcttgtccaaccgcctcatcgatatcttccatatgaagcggcagcttttcagagccgtcataaagcattctttcttgaatgggaaacacgtttttccgaggaatgaggggctccggcattctagatctaaaatcgtagggtaccggaagccggagacgctgaagcgaaagaatatcacggaaaccttcggttacgaataaagcaatatcagcccctttgcgttgtaataatgtgttcaaaccgattgtcatgccgtgtacaaagtgatgaatttctgaaggctggacaccccgagttttcaagagagccaagccgttgatgattcctcgggccggatcttcgggaacggtcggcgttttaactgcggtcatgcttccgtccgccggatttaacaatgtaagatcggtaaaagttcctccaatatcaattccaagccggtaaccttcttcattcaatcccgatctccccttttaaaaatatcctttttttaaaatattttactatcatactaatcaagcatgagaaagtagtcaattatgtttaattacaatattccaagtcttttttgtttaatattttattttaagataccataaaatcacattttcaattgtgttgttcacagtatttcacatttttggtgttcagcttttcttcggtccatcgacacattcctgtcataaagaggactaattaactactaaagcaaagatcatctgttgcgacaaaaaacctaaacgtctcgcagatttgatcataaagattcattttcatggatattcaggatttattgcccaattccctgtggcaaagtggtacactctgtactatataagtcgcaggaagggcagatttccaatgaaagtctacgaagcggaaaccctaatttcagctatgaagcaaagatctgatgaatataaaaatttgagagaacagctcgtcagcttaaaaaaagcgttaaacagcgtcgcagaacttgatgagtttcaaggaaaaggcgccgatgccattaaagcgttttacagagacctatcaggagtcgtagacggctggctggatttaaccgatatgcagattcagtttctgaatggtgtatcttctgctgccgaaaatgccggactttcagaggatacgttcgttgatgttcaatttcttgaacaggagcttgcaaatgtccacattcactctcaaaacatggtctccgcacagcagcaagagctgtcgaatattttaggacagatagatgatttaatatcgctacagccgttctcatccgatgaaatcaaacagcagcttgacgctgcaaaccaaaacagaaaagacacaatcaaggctgtcgaagatcttgatggactgctcaaaagagaatactcggcctctgaacatattcagcaaatgatccagaccgactattccgccttaatcgacgcaacaggaaaagggaaaaatgcgtctccgttaaactacaattcacatatctatcaaaacagtgaagtctataaaatgaaacatcgcatgcatcaagaggcaagaagctacatcgcaaataaacaaaaacagtatgaaacaggaaaagccgaaaaagcagaggaactttaggctttcagattgtccaaaaccccgttttcacaagcggggttttctttttcattttgtcaacacgcctccgttttaaccgatattgtatacaggtgaaacatgaaagcgatttaagctgaaattggggacgaaaattaatcttctcgtgttagccgttattctgatcttttcgtcagcactcgggattttcattatcaaagagctttcaaaagagttagaacagatggcgacagagaaagccaaaagcgatttgaaattgagctaccgttatttgaatgaatctcttgaaggtgattgggaagtcaaagaagacaggctctacaaaggttcgacccttatcaacggaaatgaagaactcgtcgaccaaatcggcaatgatacgaaagacactgtcaccatctttcaatatgacacgcgcgtatctacaaatgtgacggtagacggaaaacgcgctgtcggaacgaaagtgtcttcggaggtagcaaatgcggttttaaaagaaggaaaaaacttttatggaaaagcagatgtagcgggaaaaacatatcaaacggcatatatgccgatcaaagacaagagcggtgaagttatcggcatcttttatacaggggccgaccaggatatgatcacaagcactcttcaatcgttcctgaaaatttttgctatcgttctgactgcttcaatcatcatctccattttgcttgtcctcattttcaccaaaaggataggcggaaggctcagaatgctgactcatgcttttgaacaggcgggcagcggcaatttgacaaccgagatccaggatgattcgacagatgaactgggcgacttgtcacatcatttcaatcaaatgaatgacagcctaaaccggctgatgcaaaaaatttcacagtcgtcgcacagtgtagctgccgcttctgatcagctgacatctggagctgaagaaacaagcctcgcttctgagaaaatcaccgaagccgtccagcatatcgcaagttcatcggaaatgcagacatcggggatagcaggcagcaaacaagccgttgaacaagtttccgccgatattcaaaacatatcagaaaacgctgcgatcctgaatgaaaagagccaatacgcccgcaaaaaagcaaaacagggggcaaaagatatctccgaaacgatgcggcaaattcacacgatgcatcaatcggtccatgaaagcggagaaatcattgaaatgcttaaaatacaagatcatatgaaatcggcagcatttcaaaagcgatcacggagattgccgatcaaaccaacctgctcgctttgaacgcttcaatagaagctgcaagagcaggagaacacggaaaaggattcgccgtcgttgcggaagaagttcgccgtcttgccgaacagtcgcagcaatcagccaatcagatctcccacctcatttcagagattcaatcagaaatcgcaaccacaaccgattcaatcatgacagtgaaaacggaagcggtcaacggcgtcaaaatgatcgaacagaacaaaaggacatttgaatctattgacggcttaatggaagagttcagcgtaagaatttccgacttgtcttccgacgcccggcatatatcgcaaagcattcaaaacatcacaacatcatttacagcaatctcaaaagaagttcaggaaacatctgattattcacaacaagtcgcaggtctgacagaagagcagtttgcggctatggaagaagtcaccgcctctgcaaatgaactctccaaactggctgaagatttgcatcagctcatcggtgaagtcaaaatgaaatagcagggaaaaagggctgccgttaaaacggcagcttcttcttttccgccgtacaggaaatcaaatcgccgataatgtcttctgcacgctcatacgggagatcaatctgcagcatcttccgcagaacagatttaagcccagacgatatgctgagctcttcttcccagcatttttcttcctcgtcggacggggtaaaaccggagtacaggagaaacaatgcaaaatgccctaacgcataaaagtcacttttgactgaaactgcacgcatcagctttttttccgggtgccggttatcaacgcgttctctctcagtcaggcggcatgccagtccgaaatctatgatgcggatcgttcctcgattcacaatcaaatttgggatcctcaagtcccggtgaataatcccccggctgtgaagaagtgaaacgctgtgaagcacctccttcaatatgctgatcgtttgctgttcatcaaagacacgcccatcataaaagagcaaatcttcaaacgtttttccttcaatatactccattacgataaaccgctcgccggccgctcgaagcacctcatatagacggggcgcggcaggcagatccaattcccgcaaaatttcagcctcgcggttgaaagaccgccagccggctgatgtccatgcttttgtttttctctgctgcttgatgacgcggaaaccggatcttccaagttcttcggcaagatatgtgatgccgtagctgcccatcccgagcacacggttgattcgatatctcccctccaagacggttccttttttgagcgggcggtcaaacagccatcttatcaatgttttcacgtgatttagctgctgccgaaaaatttcttgtgctttcttttgtaatggcgatgaccgtacccttttcttttataatcgctgctgctgtactttttgtatgatttccgtccgtaatcgctgctgctgtatcgtcggtttttgccgttttgaagtgccttcaatagcttgcgaagcaactcgatcagctccttttctgtcttgtatttcatatcattcgcgcagaaaggcttgataaagggggctctgaaagtttttctttcatatgaaaaatttaaattttgaacctctaaaactttctaaacgaccggcaaaattttaaaaaaagcgatttgatagacggaaactcagcatttcaagaggaaaaacttattaatctcccctttatttctcaaatcatttttacgataataaagttgtatttacttccggtccactgcggccgaatgatttaacataagaaagcaggacaacaagaatggacaagattaaatctttgctgatcaccttgctcgccgtcgccgtcgtgatcatcggtattgtatctggcgactttttcacttcagaacaccagccttcgggccggcaaaacggctcaaactacgatgaagtgctgatttttccttcggaccgctatcctgaaacaggcgcacacattcgaaaggctatcaaaaaagggcactccgaaatctgtacgatcgacagggacggagccgacgaacgccgaaaggattcattgaaagatgttccttccaaatcaggctatgaccgcgacgagtggccgatggccatgtgcgaagaaggcggaacaggtgcttctgtcgagtatatcagcccgtctgataaccgtggagcaggatcttgggtgggcaatcaggtaagcgattatccggacgggacgaaagtacttttcaagattaattaacactgggggtacggtctttgatcaaaaagtgggaagcacaagaaatgacgatgtcataccatcagtttaccgtttatcagaaaggcggaaagccgcccgttatggattggacagacgaggatattaaaagaggatatacaacgggagagcacgcggtctcgtttgaagctctcgaaaacacggcatcttcagtagaagtccgtttgaatgcccaaaaacaggtgccctccttcaacaggcgcgtcaccgttcctttcgaagtgctttatgacggggtagaaattgcaagcgtcctatccaagaaattgacatgcgatattccgcaaggcgcctatcagctgacatgctatacaataatgcctgatcacagcggcactgcacagatcacctatcttctcgattttaaacaggcttgaacaacggataaaggcgccggtttcatccggcgcccctcctaaagctcttccccgtttgtctgaatgacgttttggtaccagtaaaagctgtcttttttaattctcttcaagtcctttacattctcttcatcacggttaatataaacgaaaccgtatcttttctggtagccgttcagccagctcaataaatctgtaaatgaccagctgcagtagccgattaaatcgactccgtcgtttaaagcctgtctgcattgttcaaggtgcgcacgcaagtaggcaattctgtagtcatcatgaatcgtgccgtcattttcaaccttatcgaattcccccagcccgttttccgttatgaaaagcggaagcccatagcggctggaaatcctgcgaagtccgattcttagaccgatcgggtcaatggcccaatcccaattcgatgtctcaagatgagggttcctttttgttttgtataaacccggcatgcctgtttcctgattgcttcccttttggccggtcgtattcatctttccttccgataccccgtcaagaggattcatttcatatgtgatggtttgataataattcacaccgacaaaatcgggttttccttttgctaaaagctccatatccccatcttcaattgtcggcgcccagcctttttccttcagatactttaaagggatgtccggatatgttccccggcagtacatatcaagccaccaatagtttgtaaattcctcggcattctcgaaggcgaggatatcatccggacggctggagaggggatatgcaggcgaataagcaaaactcggtccgatttttccatcgggaacataccggcgaaaagaatcgattgcctttgcattcgctagaaatgcaatatggttagcctcatagaagcgttttctatccttcacacccgggggatgcatcgctgtgataaagccgtgattaaagttgtaattttgctcgttaagggacacccaatatttaaccctgcctccataccgcttatagagcgtaacgcaatacgcattgaaatcctctataattcttctggattcaaagccgccgtattcatccattaaagcctggggaagatcccaatgataaagcgtcaaaacaggttcaatatcatgagcaaggagctcattaatcaagtcatcgtaaaatctcaaacccgcttcattggcttctcccctgccctgcggaaaaatcctcggccagctgactgaaaagcggtatgcttttaaccccatctcagccattaaagcaacatcttctttaaaacggtggtaatggtcgaccgcaatgtctccattgcttcctttaaacgtttttccgggaatctttgtgaacacatcccaaaccgaaagccccttgccgtcttcattccaggctccttcgatctggtaggctgcagatgctgatccccataggaaatgatctggaaatgggcgtagtcgctgatgaatcatatagctcaactcctgtttcatattttgatccggatgctccttatcatatcctatgaaacgcgtttcagatcaaacgtcatctaaaaacagctccgccaaaagcttttcccggtgctgaagaaaatacttggttaaagtgtaatgatccgtatcctcatagttcacttcagcgatttgttcaccatcaaaactaaagatttcggcttccggataccctaataaaatgggggagtgggaagcgatgataaactgagcctggctggatttcgtcaaatcatgaatgattttcaagaatgccagctgtcttgccggagataaggccgcttcaggctcatctagaagataaatccccttttctttaaaacgatgcttgaaaagcgataaaaaagattcgccgtgcgactgctcgtgaagagatctgcctccgtagcttcgaaatcccgtgatatccacttcatcaatatgagtggcaaaatgatagaaagattcagcgcgcagaaaaaagccgtttgttactttgggaagccacgacaatctgatatagtctccaagagccgatccggagccgtacacttcatatgtgttatttcttcccccgccggctgtgttaaattcgcatttatctgcgattgcttcaagcagcgtcgatttgcccgatccgttttccccgacaaaaaatgttacgtttttttgaaacgtcagttcttttaaatgttgaatagcaggaattgaaaatggatattttgcataagaaggaactccttcccgaagtaaagtcagcttttttaaaaacatgcggacaccccctgctttgcttttactcaactgtatcacgttttcttggagggtaacgaaaaaaagaggtctgcgcttgtgcacaaacctctttacttaaatcgaaaatacttcttttaaatgggcgtccagatcagctaaatattgatccacttgcggattgctgattacatcatggacagagaatgtttttaaaggcttcatgccgatgaattcctgcattttgtgcaaatgaaacagcgcttcatcaaggcttttaccttcgaagaatgtccccgccttggagaatacatccttcggcgcgttccatgtggttgaaaacatatactttttatcggtaaacagtccgcctcttccgtagtcttcagacccttgataaaaaagcccgtactcataaatttcatcaatatattttttaaataaagcaggaacgctgaaccagtaaacaggcgtctgataaataacggcatcagcccacttgaatttctcgtgttcctccgggatttgatagccgtctgccaccactgtttttttcacttcatatttttcgctcagcttgtccgccatcgctgtaaaaatagtgtgattgagctgtcctcttgcatggggataggcttcatgcccgttgatgattaaaatatttttcatctttcttatcctccttatgtttcaatttgccaatacctttatgattccatctttcaccttaaaaagtaaagcaggttgcacaatcaatcattttattttttcccaatactaattatcttattgcctaatccctacttcagtgctatggtttacttgactaaaggaataggaggattgttttaagtgaataaattgcatacgtataagcgcattacattgttgataactgtgttggcgcttgctcttataacagctgcatgcagcacagctcaaaataaggctgaaaacaaaaaaacggcctgggatgagataaaggaaaaagggaagatcgtggtagcgacttcaggaaccctttaccccacttcatatcatgacactgattccggcaaggacaagctgaccggctacgaagttgaagtcatccgtgaagcggctgaacggctcgacctggatgtcgaatttaaagaaatgggctttgacggcatgctgactgcggtggggagcggacaagtagacgctgccgccaacgatattacgatgacagacgaccgcaaagaaaagtttttgttctctacgccttataaatattcattcggaacggctatcgtccgcaaaaaagacttatcaggcatccacacgcttgaggacttaaaaggaaagaaagccgctggtgcagctacgacagtttacatggatatcgcacgcaaatacggagcagaggaagtcatttacgacaacgcgacaaatgatcaatttttaaaggatgtagcgaatggaagaaccgacgtcatcttaaacgactactaccttcaaaagctcgcgctcgccgcaatgcctgatctggatctgacaattcatcccgatcttaaatactatccgcatcagcaaggcatgatcatgaaaaaaggaaacactgaacttaaaaaacaattcgacaaaacgattgatgaaatgctgaaggacggcacaatcaaaaagatttcgaaaaagtttttcggcggtgccgatgtttcgaaaaagcaggatatcgactatatcgatgtcgatgtgaataaatagagggatttaaattgggctctattcaatgggagtatatttttaatgcagaattggctgcgaaatcgtttccttatgtgatgcaaggcatatggaatacgcttttcatttcttttgcgagcatgtttgccggtttaattctcggttttttcatcgcgcttgggcgcatgtccgggctcgctttgcttcgttggccggcaagaatctatatctcgtttatgagaggcgttccgatccttgtcatactatttatcctttatttcggttttccttatatcggaatccaatttacggctttggctgctgccttaatcggcttcagcatcaacagcgccgcatacattgccgagattatccgctcggccctgtcgtccgttgacagagggcagtgggacgctgcaaaatcggtcggattctcctactggcagacgatgcgccacgtgattgtccctcaatcggttaggattgcgctcccgcctcttgcgaacgtgatgcttgatctcgttaaagcgtcttccctggccgccatgatcaccgtgcctgaattgtttcagcaggcaaaaatcgtcggcggacgggaattcgactatatgacgatgtacattttagttgccttgatttactgggccatttgctcggggatcgctttgctccaggatttcctggaaaagcggacagaggtttatatcaaaaaataatatgaagctgccgggtactccggcggcttactatactgtgaaacggaggcggtattattcatttcctcagatcaactcattttcacgcagaaaacctttatacgatcgacagaaacaaagtaagctatcaaaccgattcatctggccatttccaagcctcatacgtctactgcaaccatgcgaatgaggaagaccgaattcatatatccgtcttctttgaaggaaatgaccggccctcgcaaacctttccattcatcgttcccgctcattcgtccaaggaaatcaacatcaggctccagcatgtgcccgcgggcagacatatcgtttatatcatcacccagaccttcatgttcgatccaaaggctgagtgcgattgcaaatggaatcgggatgccgactatgtagcgccctactattttgaattgatttcacatgctccgcatcctgaccggctgccggcacaccctgcttatattgaacccgttaactgtcaaatatacagcggaagcgcatctcaaacgggattgatttacctgtctgacaaagcaggaaaccccgttgaaaaatccggccgagaaggtctgtatatctctttggtcaaccaggaagcgcatcgtttaaagggctatttatattactttcaaaatggagaatatcaagagttcatgatcagtcaaactaaagctcaagcattctcctacgaactcgctcctgaaaccgtccagacttatccgataaacttaaaaatactcgggagcaattatttccgatttctgtcgacatccatcccgccggacggagcataccgggacgctccttttccggcgaggatgatttactactccaggctttatacgtggtagactcggaccggaatgttattccgttccatccccccgccggaccttcttaggctgcttgtgcggcagcacaggcagctccttataccaaaggacaacccgcctttcacccgaatattgcatggatgagagccttttgcagcattaaacacccgccccatccgcatattccaaatacaacagaaatgataaccgggaatgatgcttttaaactcaaaaccacgatcaaaagaagaaccgctgtggctggaaacccccatagcacgcctttcgcaaattggcttaaatgctttaaagattccccttgtacactcagccaaaataaactcagcagactgacaagcggcaaagccgcaatcattccgcccatttcaggcgattttcgtgcaatctcggttataatggcaatcaatattgcagaaaccccgatttttactattaaaaacatgattttgcctcccggcttaacaaggaaaatgctgttttaaccatttcgacttcttcctcatttaattgctccagcaccttttgcagttttttcggattaagtctcgtatgccgtttcactgcttcttcaccttcaggcgttaacgtgacgtagactttgcgttcatcgctgctgtccctgtttttctgtacaagccctttttgtattagtcttttcacatgttctgatgccgtattatgagagacatccaacaatcttgctaaatggccaatggtcacaaagcggtttttttcgatatgctgaagcatccgaaccgcttggtgagacaattgatcatcatgtttcatgtgcagatggtagtaaatatccgtccagttctgattcatcacttctatggtttgttccgtattcactttcatcaccctctctaattacatcttataatacgatatattcttaaatcaagacataaaaaaacccggcttcaccgggtgttcgcttttatttatttcagatgctttctcagaaacgccagcttttcggtttggaacggcgggatgtattcgtgtccaaaataacggtacacttttatttctttatccgtttccaagtgattgtaagccgcaaagacggtggatggcggagtgatggtgtcaaccagtccgatcgacatgagtacggtcgctttgaccaattgggcaaggttcatgacatcgaaataagacagggtatgcatggccgcctgctcaatatccggactggtgtttcttctgaaaaaggagttgatttcgagatatggctggtcgatcgctgtatcgatcgctcgttgaaaattgcttaaataagggtattctgacacggctgcttttggaatatcggacagcgccgaaaccgcgacggccagcccgcctccttggcttgccccgatcaccccgatccgcttttcatcgacttcagcaaaaccgctgaccacttcgactgctcgtacggcatctaaatagacccctctgtagtaatatgttttcggatcgaggattccttttgtcatccagccgggtacatgtccgtgatgagagatctctgtatcttcactgctgttctgtccgcggaccagcataccgaatgccgcatagccgtgaagagcccaattgacaatatcgtgaatgtctccgtcatagcttgcgttatagccgtggtatttgacgatcgcaggatgaggcccttggcggtcgggtactgcgtaccagcctttaattcgcgctcccccgatgcttctgtatgtaagccagtagacttttaccccgtcagccggatattcatgcggttcaagctgcggtcccgctttttcatttgccaattcctccaatgaacccttccagaactctttaaaatcggccggtgccgtccgttcaggtttatactgataaagctgttcaagcggcatatcataaggctgctgcatcttttctttcccctcttcttttcattttttgaatattcttatcataacattccctttcaaggctgtgtattgattctgttactcatgcgcctcccattatctgacccccgccacacaaaaccgcttttttcaatttatgttataatgctagattgaaactaaaaatatggatttgcgcggaggtttttttgtggcttcacaatcctttctgcagctgaactcaatatttatcagtatattaatagaagcgattccgttcgtcttgatcggggtttttatatcaggtttgattcaaatgtttgtgacggaggagatgatggcgaaaatcattccgaaaaaccgatttctcgccgttttgtcaggaacatttgccggggtattgtttccggcttgcgagtgcggcatcgttccgattgcccgcaggctgcttttaaagggagtgccgcttcatgcggcggtcgccttcatgctgacggccccgatcatcaatccgattgtattattctcgacattcatcgctttcggaaacaaatgggatgtcgtgttctaccggggcgggttggcgattgcggtgtctctcattgccgggctgatcatctcttatcaatttaaagggaatcagctgatcgaaaacgggacgcacggacatcaccaccatgtccatgagagccagtctttcctgcaaaagctcggcgggacgctccgccatgcagttgacgagtttttctcagtcggaaaatatttgatcatcggcgcatttgtcgcagcagcgatgcagacgtatattaaaacatcgactcttttggcgatcgggcagaatgatgtatcttcctccctcgttatgatggggctgtcatttgtgctgtccctttgttcagaggtcgacgcttttatcgcttcttctttcagcagtacgttttccctcggctccctcatcgcctttctcgtattcggagcgatggtggacatcaaaaatctgctgatgatgctcggcatcttcaaaaagcgctttgtgtttgtcttaatcccctacatcgccgttattgtcttagccggatcactgttggtaaaggggtgagaacatgtttcgcacattcattttaatgttgtttacgtttttcttttttcatcttcatgcatccggcaatctgacaaaatatattaatatgaaatacgcttacctttcatacatcgctattattcttctggccattttgacagctgtgcaattctacatttatatgaaaagctcggatgaaaaaggatgtaaccatgaatgcggatgcggccatgaccacgatcatgaaaaagataagccttttctgcaaagaatgttcatttatttcgtgttcttcttccctttatgcaccggactttttctgccggcagcgacgcttgattccaatatcgtcaagtcgaagggcttctcgttcaaagcgatcgaacagccggagcattatgcccaaacccagtacctgcgccccgacacaagcatctactacggccaggatgggtatgatgaattgatgaataaagcgctgaaaaagtataaagaaaaacagcatattacattaaaagatgatgattttttgaagggcatggaaacgatctatcattatccgggagaattccttgaccgaacgctcgaattcgacggctttgcttttaaaggggaagcgatcagtgacaaacagctgtttgtcctccgcttcggcatcattcattgcatcgccgactccggcgtctatggcatgctggtcgagttccctgaaaatatggatattaaagacgaccagtggcttcatgtaaaaggaacgctgtcttccgaatactatcagcctttcaaatctacaattcccgtgctgaaagtgaaggattggtctgcaataaaagagccgaaagatccttacgtttatcggacatattaaaagccggcacttcatgtaccggcttttctttttctgtttacgatttgtagcctgctttcttcatcagcattaaatcgataaacaactgacatcttgtattaaaatcattgagatcaatcgatgtcatttccaatatttgtttaattcggtagttgagcgtgttttggtggataaacagctgttctgcggatggcttgaccttgcaattgttgacgagatagatttcaagcgttcttaaaaattcggtgtggctttctttatctttttctttcagcagctgaaggtccgggtttacatattgcagatgatcgttttttgcggcgatttggtcaagatatttgaaaagcccgagcttttgatattcatagggaatgtgttcttggcttcccgtgatctccgctgctttcgtcacttggagcgcctctctgtagcttttgccgagggagagcaggctgctgtactcattgccgaccccgatcaaaataaggggcagcatttgcgagcgcagatgggtcaacagacggttgatcagttctgaggcagcggccagcgcggaacgcttgcgcgacacactgccgacaatgattgcgatattcgaatgatcctccagtacgtgactgatgttgtctttcaggtttaaataagaccggatcgtttcctttagatcttcgagcagttcatcctccccgtcaacgacttgaagcaccatgacggtaaacacggccggcaggacgacgttcgctttatcggcggcggccttcagctctttttccgtttgaaactgatcgttaattgcctttttgtaaagctcttccgcctgttcttctttttcttgtttgaggcgttttttcttataaatgatcttcccgacatgaaaggaagcttgatataagaaatcaagctcttcatcagacaggttgtcttcaatctcctgcacccagatatagcccattatttcgtctttatgcttggcgctgacgacaacccgctggtttaagccgatttcttcaatctgttttacccgaaaaggagtcggaatcgttttcaattgatcaataatgccttcttcgacgaacttttcaaagatcggcagcggacattttttggagaaaatcgtttgctggtttgctgcatcaaaatggttaatataataggagttgtaagctaataagaaaaaatctgcgctttccagtatgaccggctttttcagctccccgctgataaagtcaatgatctcattaatgtttgaaagagaaacaacttgttctaatagctcttccatatcctttctcctactcgtttttaacttaatcatacttctcctttacactcttgtatagacttatatgcgacttttaaaaaaatgggatcaatcccctgttagaagggggagaaggcctataaaaagagagacggagaatggttccccatctccgtcatcgttacagcgtttgtttgtattgctcgaattcatcaagcacctgctgctccggttttgacgtcaatagactgacgacaaacacaaacagcaagctggcggcaaagcccggaatcatttcataaagaacatcggaaagcccggcttccgcccaaatgatgacggtaagcgctccggcaaccattccggcaagcgccccccattttgtcatcctcttccaaaacaaacttaagatgaccacggggccgaacgacgctccgaaacccgcccaagcatagctgacaagaccgagaatcgtattgttttttgtccaggcgagacagagtccgacaatggaaaccgccaaaaccgaaagccgtccgaaaaagacgagttctttatcagatgcagagcgcttaaatagtgttttgtataaatcttcagttagagaacttgatgtcacaagcagctgggaggaaattgtactcataaccgctgccaaaatcgccgagattaaaaatcctgtgattagagggtgaaacaggatgttacccaattgaatgaagatggtctccggatcatccaagtgaagcccgttcttcgagtaatacgcaataccgagcaatccggtcagcagtgcgcccgcacttgaaaagatcatccaacccatgccgatccggcgcgctttcttcgtttccttgatggaggatatcgccataaagcgcacgataatatgaggctgtccaaaatagccgaggccccatgagaacaaggagatgatgccgaggacgctcgtacctttaaaaatattgaggaggtttggatcgatcgactggatctcgctgaaggcttctccaggtcctcccgtctgaatgaccgtcacaatcggaacaagaattaacgcgacaaacataatgatgccttggacaaagtccgtccagctgactgccaaaaacccgccgaaaagcgtgtaggccacgacaacgcctgaaatgatccacagccctgcatggtaatccaaattaaatatgctgttaaataaaacgcccccggaaaccattccagatgatacataaaacgtaaaaaaggtaataatgacgactccggaaaatattcgcaggatctttgatttgtcatgaaaacggttttctaaaaatgcagggatagtgattgaattgcccgctacttcggtgtatgaccttagacgcggcgctacaaatatccagttcgcccaagcgccgagtacgagtccgatgacaatccacgaaccgctcaggcctgttgcaaacatggcgcccggcagccccatcaaaagccagccgctcatgtctgatgcgccggcgctgagcgccgtgacagcaggcccgagcgttcgtccgccaagcatatagtctgagaggtttgctgtccgtttgtaagcgtaatacccaatataaagcatccctaccatgtaaatcacgatggaaatgatcaattgtacgttctgaataagaatctccccccaagatgccgtttatctaaatttttagactaatttctctttttttgaaggcagcctataataggctgccttcgtccccctgtttaaccccttttcttacaccttaaaacatttcgctgatcgttttcgcctgcatgtgaagcgcaagataatcaggtccgcccgctttagagtcggttcccgacattttgaaaccgccaaacggatggtagccgacgatcgcccctgtacagttgcggttgaaatacagatttccgacatggaattcttgttttgccctgttgatatgatcgcggtttttagtaatgaccgcgcctgtcaggccgtattcggtgttgttggcaacttccagcgcctcatcaaagctgcttacttttgagaaagcaacaacaggtccgaaaatttcttcctgcattaaccgggctttcggatctaaatcggcaaagatcgtcggttcgatgaagtagccttttgaatcatcgccttttcctccgctgactaagcggccttcttcttttccgatttcgatatagtccatgattttgttaaaggatgcctgatcgatgacaggtcccatgtaaacgtccgcgctgtcgggctctccgactttcttggactccgtaatttcaatcacgcgcttcaatacttcgtcatataccttttcatgcacgacagcccgtgaacctgctgaacatttttggcctgcaaagccgaaggcagatgtgaaaattgattgtgcagccaattcaatatcacagtcttcatcaacgacgaccgtatcttttccgcccatctcagcgatcacttgttttaagtgggtctgaccaggctgaaccttcgctgcacgctcaaaaatgcgcgttccgacttcccttgaaccggtaaacgtaatgatgcttgttttcggatggtccaccaaataatccccgacttcagctccgcttccagggacgaagttgactactccttttggaagtccgctttcttcaagcacttcaacaaactttgcggcaatgacaggcgctgcgcttgcaggcttcagtacaactgtgtttcctgtcacgatcggcgcaactgtcgttccggccatgatcgcgaacaggaagttccaaggcggaataacaaccgtaacaccagtcggtgtgtacacatattgatttcgttcgccttcacggctgttaaccggctttcctttcgcaagctcaatcatttgccgcgcatagtattccataaaatcgatcgcttctgccgtatccgcatccgcttcattccaaggttttcctgcttctttgactaaaagcgcagagaactcatgctttttgcggcgcactttggcagccgcgcggaataaaacagccgctctttcttcaggatctgtgtatctccaagtttcaaacgctttcgcagccgcctgaatggccttttccgcatgatcctgagtagccttggataccgtgcctacaacttcttctttgtttgcagggttgatcgatacgatcttgttttccgtttcatacctttctccatcgataacaagaggataggactgacccagccattcgttatttaccgtttccagagctttttcgaatgccttccggttttcttcaatcccgaaatttgtaaatggttcgtgtttgtaaggtgttgtcatgctaatctcccctttttatcgttttatttcttcgtcatgcctttaaacgcaaaagcgatgttggcaggccgctcagcaagccgtctcataaagtatccgtaccagtcgtctccgtaaggaagatacacgcgcatattgtagccttccttcaccagttccagctgagttttgctgcgcatcccgtacagcatttgaaattcgaagcggtctttgccgatttgatgctcattcgcaatttctttggcgaaatcaatcatcttgtcgtcatgagttgcgatagctgtgtaatggccgctcagcagctgctttttaatgagctttttgtaattctcatccacatcctttttgtcagggaaagccactttcggcgattctttataagctcccttcacaagacggaaaaacggatttaatgaattgagctcctccaaatcctgttcggtccggtacaaataagcctgcaggacggtgctgacatactcgtatttctgcctgaactccttaaagaggtcaagcgtcttttggcagcgcacttcatcctccatatcgattgtgaccatcacttggtgctgctcggcacattccagaatactgttcatattatccctgacaaggtcaaggtcaatatcgagtcccaatgacgtcatctttaatgaaacatgtgaattaagctgttcctgagcaatcagctgaatggcccgaatgcattcctgcgtgcgctcccttgcgacttccctgctgttcacaaattcgcccaagtgatcgactgtcacagtcagcccttgttcgttaagccccttaataatcggaattgaagcttcaaaatcttttcctccgataatttttccggtcgcgacggaactcccccaatttctcgccaggcgattcaggatgctgcttttagataagaataggaaaaagtctcttgttatcacttccattatcacaccccgccatctcatgaaatatttctttatattcttaattttataagagccaagggtcgattcacaatatttcgaaaaaacaaaaaagctgacgatttttgtggtttttccacaatgttttacatctggtggaattttttcagaaactttcttcctaaaacttggatggtatacaacaatagaatcaggaagaaacttcggtaaagaacagaatgcgtttttggcgaatggccttgctgccgttccgccccgctttttctgaaaacgctttctgttatactaaaccatttccctatggatacaaagaaaaaaccctttaagaatacttaaagggaatatcattttatgcccacacctcgtctagcgtttctctaaacagacggtcaagctcctgcgtcagatcttcatgatccgttttatatgctttggcaactgtctgaagccgctcaagttcacgctcaataaattcgtggagaatggggttttgaggttcaagattgaactcctcccctttctttttcctttcaagcagctgatggatttctgttttcagcggtccgtcttccgtaagttcgtcaagcaaaacctgaaattcaatcggaggaaccgtccggcggctttcgatccactggcaagccagaatcgggcggagtacataaaaatattttttgattttcacttcttcacgcgtcaggtagtctcggaaatttcccgacgccatattgagataatggtacatacaggagactggagaaaaggcgcggcttttgagccgcctcattttttctgccagcgaataggcttcataataaacggttcccgaagagagccattcgagaagcggaggatttgatttccggaacagccttaacgcttttgtcagctcccagccgctgatatcgagagaatcgtcaatcggcagttcaatcacatcgcgctttgcatcaattgacagataccagtctttttgatggacataaataaatctgacgtcgtaatcgctgtcctgtgaaggaaagccccatgccctgctgccagattcaacggcatagaggattttgacgccatatgttgcttcaatgtttttcagttcttcttcaattcgctgtttcatgataagtacaccgccagtctatcgtttctattatttacattatagtgtccgggccggcaataagcgacttttttaaagccttaggggcggaaaaaccttatccagggaaaaattggtggcggggtgtaacgtgatgcccatcctgatcccctatactgtatcaaacggacaaacggtcaaacaaggccgaaaaatccggcattcatctgcggataacggaaagagccaatgatcagacagaccattggctctttgcttattccggtatatttagcttaattaaacgtttgtttaagattgaccaagctttagcatctccacaatatagtcggccgtttcttcggcagaccggttatcggtttccacttttaaatggtgaaatgcataaatgctctttctttcattgaacagctgtttcatttcttcaattgtgcggttatgaagaaccggccttttttcaatcaagagatccatccgctgcttccaattctcccatcttaaatcaagaaagatgacaaagcagtgttcgaggcacttctttctgatttcctcctgctgaaaagcgccgccccctaaggatacgatgttgcccattgtatgttcgcacatctgaaaaatatattctttttccgtctgtctgaaaaacgcttcccctttttgctgaaacatctccggaatggtcatttgaaagtctttttcgatctcgtggtcgatatcgataaagtcacggcctaatttctttgacacaagctggccgatggttgtttttccgacgcccataaacccgatcagcacaatattcttatctcttattgcggcattcatttccagcttctactcctccctgcataaaggaatcaaatatcttaagtatatgacaattccatctgtaatgatatagggtgcctgttaataaaaaaagaggctgacttcagcctctttttagcttatttccaccagtcgtcaaacattgaagcagggacttggcgtttgtgctcggatgccttgtagcgtttttcgatggcctctgccacctcgctggagacggcttttccttcaaggtagtcgtcgatgttatcatatgtcaggccgagctctgtttcatcggattgctgaggtttttcatcaagcaaatcggcggtcggggacttcgtataaagccgctccggcgctcccagctcttccagcaggcttctgccctggcgctttgtcagtcctgtaagcggcaaaaggtctgcgcccccgtctccgtatttcgtaaaaaatccggtaacagcttctgcagcatgatctgtcccaattaccagcagctgattttgacctccgatcgcatattgggtgatcatccggactctcgcttttacattgcctttgtgaaaatcggcaagcgcctctcccgtgactgactgatattgagcagcaaatgaacctacagttgaagcaatgtcaaaagcaaaagacttgtccggctggataaatttcagcgccagctgggcgtcatcttcatcctgctgaacaccgtaaggcaagcggaccgcaataaattccgcctgaatgccttcttccctcaattcttcaacagccagctgggccagcctgcccgccaatgtggagtcctgtcctccgctgatgcctaaaacaaagcctttggcacccgtttttttcaaatagctttttaaaaaaccgacccttttttcaatttcctgtttcggttcgatagaaggctttacattcagttcctgcatgattttttcttgtaaagtcatccgtcactcctccttttgactgaatgaaccgtaatgattatgtctttaactatagcatatgtctcatttcaaagtgaatattgaggtgcgcaaagaacctccccctttgcgaataaaaacggagccccctggcaaaataacaagaagattagaggggttgaaacgatgaaacgacaagcgaaaaaaggagatttaaaatggtggcagctgtccatgatcggggtcggctgcacaattggaacggggtttttcctcggctcaagcatcgcgattaagaaaagcggcttttccgtattagccgcctttcttcttgctgcccttggcacttttcttgtttttcagcagctggcgaaattaacggcagatcatcctgttgaagggtctttttgttcttacgccagagaggccttcggcaattgggcggggtttagcaatggctgggtctactggtcatcggaaatgctgatcatcgggagccagttgacagcgatttccctgtttacgcgccattggtttaacgagattccgctgtgggtgttcgcctctatttatgcgattctcggattgatcgtcattttcacagggcgcagcagctttgaaaaaacggaaaacatattggccgtgttgaaaacggcggccattttaatgtttatcatcatcgctgtcttggcattgtgcgggctgctgcctggaaaaacgcctgaagtgcagttccccgaccgggttcacgaattgtttcctttcggctttatgggattgtggacggggttgatttatacattttacgcttatggaggaatcgaagtcatgggtctgatggcgattcacttaaaagacccgaaggattcatcaaagtcaggcagcctgatgctcataacccttgctgtggtctacgtcgtatcgatcgggctggccatgctccttgtaccacgcggaacattcaccgaacagaacagcccgtttattacgtcattaaaagactttcatctcgatttgatcatggatattttcaacggcatttttattattgccggtttttcaacgctgaccgcttccctgttcgccgtcaccacactgatgggaacaatggcgaaaaacggggatgcaccggcctgctttgccaaaaaagaaaaggcgaaagtatcgtggccggcactcggcctgacagtgctcgttctcgctgcttccatcgtcttgtcgctcattttgccgaagcagctttatgaacacatgacgacggccgccagcttgatgctgctctataactggatgtttatcctgctttccagcaaaaagctcacaaaaccgaaaatgaaagggaatgtccagattgtcacagcgctcgtcctgattttgttcgccgtttcgggtacgttatttgaaaaaaacagcagacccggtttttttgtgagccttctctttcttgccgttattgctgctgtgacgatgctcatgaaaaaaaagtgggcggatcaggaagagaaaaacgggcagacatgatcagcgccccgcctgcagcagttcgagaattccctgatagccgaagtagcatccaaatacgatcagactgatgcccgcgagccaagtcgttccctggatcatccgcgggcttaaaaatgttctgaatgtcccggctagaaaagacatggccaagtcccacagaaaaagtccgattaaaatgcctgaactgcagatcagcagctggtatgattcgtacgcctctaccgttttcgcgaaaatgcttccgtaaatgccgagccagaacatgatgctcagcgggtttgaaagggagatcaccagccccgacaaaaaagatttgcggtatgaccctttctctcccgcacctctcatcagcgatacttccttcgccttgaccaggctctcgatccccgtataggtcaaaacaaaaaaaccaaacagccataaaaacgtttttaagaatggcgctgtcaaaaattgcgcaactccaaagtagattaaagccatatataggacatccgccgttacagcgccaaggccaaacagccaggcatgaaagaatccgcctttcatgcctctgtcgatctgcgcggcattcacaggtccgactggtgcggccaatgacaaacccaaaaacacatagctcaggaagatgttcaacatatcgcgtcccccttccgcggataacttgtacaatgtattcaaaaagaggacatgatagaacaagcagcttaaaaagccttttcccgcaatgggaaaaggctcttctttatatgccaagctttgatagcgcaaacgtccaaatgcaaatgatgaaaagcagaaccaggctgtatttaacggtttggctgaaaagctttgattcctgccctgtctctttaaccgcggctgttgcaatcgcaatcgactgcggtgagatcagcttggccatcacgcctcccgcggtatttgcggcaagcagcaaagccgaacttgtcccgatttgcgctccggtgactgcttgcaggtggccgaataatgcgttgttgctgacgactgaacctgtgataaagacaccgatccagcccaatacgggactgacgaacggaaagatatcccccgctttggcgagcgccagtccgatggttgaactcaatccggcataattggccaagtttgcaaaacccatcacaaagcaaatggtgagaacgggaagccacagttccttgaccgtctctttcagactggaaagtcctccgcggaaactgatgtttcggctcagcacaatcgtgatgatcaccgcgatcaggatcgccgtacccgtcgctgaaatgaagtcaagcttcatcacagcatcaagcggtgcctgttccggagatatcggcggcgttttcagcacttcccggtgaagaaaaggcatgttgaataaaattgtcgtttgcttcaggaatccgccttcctgaaaaagccccttaaaaccgggcaggctccacaccgcaatgacggcggtcaaaatataaaacggtgaccaagcgttcataatgtctgctgcacgatatttttcagcgggcacatgttcattcccggtttccctgtatatgtggcgcggctgccactttttcaaaaacagcgccagcgctcccatgctgattaaagcggccaaaatgtcggcaagctccggccccaaactaatcattgttaaagtctgcaccgccgtatagcttccgcttaatacgagaagagccggcagcgtttcccttattcctttaaacccgtccaatatgaaaacgagcaggaacgggacaaagaaagcgatgaccggcagcatcaaagcgagcgttctggaaagctcaaccggtgttaagcctcccatctgcgctcctgtgataaccggaattccgatggctccaaaggctccggatgccgcattcgctattaaacatagggatgccgctttcaaaggtttaaaaccaagctcgacaagaagaacggcgctgatcgcaatcggcacaccgaagcctgccgcaccttccaaaaaggcgttaaaactgaacccgatcagcaatagctgaagccgctggtcggacgaaattccggcaatgctcgctctgatcactttaaactttccggttttgacagaaattttgtaaagccatacagccatcaggacaatatatccgatcggccaaaggccgttagcaattccaagtaaaacggcggagacagctttcgcagccggcatgtgaaagaagaacaccgctacaataaagctgaccgccagcgtcaaaaatgacgcaatgattcctttcatcttcaacacggtcagtgcaagaagaaagaaaagaatcggcagtatggcggcaaaagcgctgataaacagatttccaaacggatcgtatatctgctgccacattttcatcatctcgcaatcttcatgatgttagtatcttcatggtgttcagttacgcctgcagttcaaaatgcggttttagaattgcttttaacacacctgcgctatgcttgaattgttgtttttccttttcgttcagatcgagctcaacaatttccctcgctccgcatcggccgacaaccgccggaactccgatataaacatcattttctccaaattcaccatcaagatgagcgctcacggtcaaaattgcttcttcatttcgataaatcgctttcgtaatacgtgcgaggctcatggcaactccgtagtatgtcgcgccttttttctcaataatgtggtaagcggcgttttttacattgtcaaacagttcatctagatcttccgctttgtatttctcatttcttttcagcaagtcgctgacgggaactccgccgatattcgcatggctccagacaggcagctccgtatctccgtgttcaccaatgatatagccgtgcgcattgtgggcagcgacaccgaaatactcgctgagcaagtagcggaaacgggcagtgtcaagcgttgtgccgcttccgatgacgcgttctttcggaaggccgctgaatttccaagtcgcataagtcaagatgtcgacagggtttgtagcgacgaggaagatgccgtcaaaaccgctggccatgacttctccgatgattcctttaaaaattttcaagttcttttcgactagatcaaggcgggtttcacccggcttttggttcgctccggcgcatacgcagacaatatcagcttctttgcagtcatcatatgtgccgtaccatgttttcacaggatgcggagcaaatgctttaccgtggttgagatccataacatcgcccattgctttgtctttatttaaatcaatgatcacaagttcgtctgtgataccttggttaattaacgtaaatgcatagctgcttccaacaaaacccgcaccgatcaaaactgtacgattgactttttggtttctcatgactcatcattcctttgccgtttgttttaaactaagctgtttgtgaaattcttcacattcatattgtgcaatacttcacatactttttcaagtgatatacatttttatttatgtctattttgtgtctccacgtatttcttccttaaatttgtacattttctggtaaaaatatgccttatgtctaaagaaaaattgataaacgcgttgcaaaagacggttttatctgcaagtgcatcgggcctatatcaatataaggtttcccattttcagcgctcataacaccactattcttcagcataattcaattatcgcctgctatagtgctgtccaaactaacattttaaatattcaatcttttagtttgttagtaaagcttacaaaaatactgccaaccctattcgattttgtcatgataaattctagaatctatcggatggggagtgttgcaattgaaattggcggatttgaggaagagcggacacgcgccttccttgttgtcatcttttttatatttcgatgtcagctttatgatttgggtgttgctgggggcgcttggtgtttatgttacggctgattttgatttatcgccttcacaggtcggattgattgtcgccatacctactttggccggatcgtttttccggattgcgctcggcattttaaccgaccgtttcggaccgaaaaagacggctgttggcggaatgctggtgacgatgattccgttgttatggggatggcagttcggttcatcggtcgccgagctgtatatcatcggaattttactcggtgtggcaggcgcaagcttttccgcttcccttcctatggcgagccgctggtatccgccgcacttgcaaggtcttgccatggggatcgccggggcgggaaacagcggaacactgcttgctacgctattcggccctcgccttgcggagcaagtgggctggaacggcgtcatgggactggcgcttattcctttaaccctcgtgttattcagctatttccttatggctaaagaacctccgaatcagccggctcctaaaccgctcaaagactattttgccgttttcaaagaaagggacacttggtatttttgccttctctacagcgtgacattcgggggttttgtcggcctgtccaactttttaagctacttttttgcatcccagtatgccgttccggcggtaagagccggcgaatttgtcacgcttgtcgttgcatccggaagctgcctccgccctgtcggcggattgattgccgataaaatcggcggcgtgcgtctgcttcaattcctctttatcggagtggctctgtgcatgttctcggtcagtatgctcccgtctctaggcgttgtcacagccgcattatttatcggcatgggctgcctcggaatggggaacggcgcgatattccagcttgtaccgcagcgatttcaacaagagatcgggatggtgacggggatcgtcggcgctgcggggggaatcggcggattcttccttccgaatatcctcggaacgctgaagcaaattacaggtacgtattcaagcgggttcctaacctttaccgttattgcatttttagcgctcggtctgcttttgtttgctcaggccggatggaaaaaacagtggaaagccgaggagaaatcaatccgaatttaaggggtagccgctcgattcttttcgggcggttttctatgcggcatatcctgtttgatcttttggttatccggcccgatcatgacaattggatgctcatcatcaccctgatcctcctgaatcatgaaatgcagattcaatcgctctctccgcaaattccataatcccgctgtcaagcggataaagcccgtttggctcctcagacttgcgaacctcccagaatcgatcggctaaatcctcatgtcccttaaacgaatgatcagacaggcatatgatatcctccgcaatttgctttccccattcagattcaggcggcacctcttgttttaaacacagcttaatccgcttgatgatagagagccattgctttgtgatgaaatcgtcactctccgccttcggaagcctttctgctaaaatctcagcctcctcttcagagaatgattccttccatggtttatgccggggctgtctgacgagcttgagaaggtcttcccagctcaagcttccttcgatttgatacatgttcagcaaagtatttgtatgctccaggctcttcgtcagctgttcgatctccgaattaaggcgccttttatgcatttcgatgatactaattgtatccaattgattcattaacgtcttgatatgctccaatgaaaattgagcagatttcaagatcataattttttcgagctctaacaaatcttccttcgaatattgccttcgcccattcggcagtgtagagcccggttttaataaaccgatttgatcgtagtagcggagcgtccttacggatatccccatcatcttcgccacccgcccggttgtcagttcctctttcaccatatctccctcctaaaatattgcttgaagattacgttacgtcaccatttaaaatgattttatcttaaaaacaggagggttttgtgatggaatggaaaaatccttggaacaaaaagcagctggtctgcttgtttttgatcgcatttgcagccgtgccgattttcattgaatatttattaaagaatgctttggatctgcttttaggcgaaggcatgctttcagccatgttgatgagtatcgcaatggcggccgtttttattctaagcttgtactatatcgccttaaagccggaccgtctgtcttggcgggaaatcggaatctcccggttcgcccctgcatacttgattcaaatagcgggatggacggtttttttaatcgtgatgacgtttgccgttatggaaatcctgatttggttcggcgcaggctacgaaaatacaaaaacaaaaacgatcactgccgatccttcatggttgagcattgcaatgtctttcgcttctgcctgcatcgtttctcccatctacgaagaattgttttaccgcggttttctttaccgctggttccgcgctgaattcggggttgtatgggcacttgttgcaagcagcgccctctttatgatcgctcatatccccacatacaacaccctggccgttaactttggaacagggctcgtgtttgcctggacatacgaaaaaacacgatcgattatacctgcgatgatcatccatagtttatttaacgcgattttgctgtttttcacaatcttactcacataatgcagcatgcggaagtttttcaaaagagattcgtcaaattcgaataccagatgttaatccatatcatgttgtccgtataaagcaggatgccgatgacgatcatcagcgcgcctccgatcttcatgagcatattcgaatatttcataagcggcctgatgtttccgataaaaaacgccatgagcaaaaaaggaatggcaaagcctaaagaatatgcggtgatcatcatgaatgcgctcccaaaatcagggttctgaaaatttgcgtatgcgatcgttccgaatataggcccgatgcacggcgtccagcccgccgcaaaaatcattccgaccagcattgaattcagcaggcctatttttccctttctaatcgaaaagcgccgctccttcatcataaaagccggccggaaaacgccgagtaagaacagtcccatgacgacgaaaaatatcccgcccagcatgcggattaagttatggtattgcaaaaacagcagaccaaccgagctggcagagaaacccaatatgtaaaaaatcacagaaaaaccggccaaaaaagccgctgcgtgaatcatcaccgattgtttgatatgctttgcatgccggtttttcaaatcgccgaccgaaatcccggtgatgtaggaaataaatgatggatacaaaggcaggcagcaaggagaaataaacgacaggaaaccgccgccgaatgccagccataaagcggccatatacttccacctctttcatgtttatatattttttaccatgcgattctctttctctagcataacataaaaaaccgcctatcatggcggtgattttttgtatatttgaagccgccgccagctgatctgggggcggcttcttctttatcctttttaaccgtttaaagcggcttttttcatattgtcctgaagttccaatatgcgttttgccccttcttcgcgcaggcgtttgttctcatcttcaatctgcttcgtctcctgcatgcctttgacaatcgtattccaagattgttcgatcgtttcaatatcgatgctcggtcttccggacattctggcgatttcgacggactggcttgaaatattttccgcgttgcgcttcagcatttcgttggtgcggcggtcgagttcgctcattgaatcggcgacaagtttttggcgcttggcggtaacggcctggatgatgccgtttttgaaaatcggaatcgtaatgatgaatgccgagttgatttttccgatcagctttgtgttgccgcgctggagcaggcggatttgcggcgccgtttgaattgcgaccatccgcgccatatcgagatcatacacccgttcttccagcgcttgaatgccgtttcgaagcgtatcaagctccatctgcgccatctggtttccgctggccgctttcgcttcatattcggggatgagccgctgcaattcttctattttcatctggccggctacgacgtatttttccagctccacatagtatttaaggttgctttcatacatttcatcaagcgtcacggtcgattttgtcatttcatctttatattttgaaatttcgacattgattttttcgatttcaccgccgagcgtttgatattttttaaatattttctcgatcatgctgttgccgcgcttaaataatttagagagcaagcctttttgttcttcaaagtcattcttgtcaaagcggtccatgatttttccgagctgcgtcaacatcgcgcctgaatctgtcacactgttcgttctcatcatggaaagaatgcggtcagagaacttggatatttcaagagcgggctccttaccgaattctaaaagctccacttggtttttcacgtcaatttgtcgggccagagcttgcacatccggctcctggcggagtttcgcacggatgtcctccgctttttcaaccgtgatctcttcctctttgctaatattgacgatgcttgtttcatttggatttgccatcagaatggccccctccttaaaagattttattgatgaacttccggacgattgacggctctttaaactcctggttgaaggacatttcatcaagccaatgggtatcaaagtgctgcctgtcgatatagtggtcaatacacttatggcccggcggattatagatgataatgtcaatgccgatttcatttaacaaaagcaaggcggccgcgtccgaccgggtgagtgtccccgtctgttccgtgtgatacaagatcagcttcggcacggtctgtgaatagtcaaatgtctgaatcatattcaatagcgctgccggaagctgtaccgcttgggtaaacaaatacagctgtacatcggctgtcttttcattgttcaaagccagcatcttcgggcttttgcacatcctggaaaccgcttgggcaatgcctcgctgtactccctcaggcagatgcttgtagcgccatatattgctctccattaaacggcctggatcgatcatccccgtttgatcaagcgcatcgctgtaatggaattgataattcgacgtctcttcctttgtaaacgggaagcgccggatcgtatgcgactccttatactccgtcagtgtctgcagacggtcccagtactctttttcattgctggagacgcccatgaccatcgcgaataaattcggaatgttaaccgttgatttagacgcctgaaaattaggtctgataaaggctcgttccttcgcaattaaaaacagttcatcatatgttgtcttcaaagtcacagaggccggagtatgctccctgaactgccaaggtttgtacattagcgaatcctcattgtgcaggacagtatccagctccttcgcggaacggtacgccaccgttgctttgcgctggggcttttcagtcgggaacggctctaatgcagacgtgtccgggtatgtgaagacaaaagaaagcttttgctcgggatcaagctggcgaaattcgtcttttccctccggatgaaacagcagcacatcgcatccgacaagcatcaaatagtataaaaaataccgttggcttttggtggtgtccccgtaccaaaccactttcggcatcgccgtttcgcagtcggcccctttcagccacttctccaaatggttgcccatccatttgacaaggtcaaggaggacccggcgaaaatccggatcgttcaatcctttttcatgaaaggactgaaacagctgcagcacttcgataagcgccttccttaaatgccggtgcatagcgggatcagggtgcttaggaatcagctgctccccgtcaagaaaagcggcaaaccgattgacggaaagtcctttttctttctggttcaccatatggatccgctgtatggcctgaaacctttccggagaaatggtcttatcaagcgtctcgcttaacacatgcacatcaccggacgcatacagctcatggagatatatgtagtaatccgtttcatcgtgcggagttccaagaatccgtcccgccagacggcttatcgtcaaatgactgtttttttcatacggggttctctccgggagcggcttcttgatgatctgcttccattcatcatcattgaccagggcgttttgaatattaatctcttgattcatagcgctcagccgtctcccctttcttctgagtcagtgtcgctcttacgtccaaatacggcacacatgcccgctcttgtcacggcataggttgtcccgaactttctgattgttcccgcaggaaaatcatgcgctctctttcggagcgtagacgaatcaatcccccactcttcacatgcctgctgggaactgagaatctcgctgctcgtgagatcgactattttcatcatggctgttcatcctaaaatttcatttgttttctcctgagaaattcacaatgtctgcctttgagatcatggtggtagtgcggctcttttacagtagaagcactgatcttttaaacgttttgcccatttccaatcacccgtcccagactaactcccgaacgatccaaggtttgaaaacggtttggacgctctaagtatatccgtatagctgcggttttcatgatataccccgtagatttcagcctttaataatatttttttggcccagctaaggtacggcttgatttcgatcattttatttgagaaagaactttttacaacgccgcgggtgccgtcggcactttcgacgatgcttaaggcatccagataatcctccattgatataacatgcaggctttggaccgcttttatttgtgacggatgaatcacgctttttccgtgaatgccgttggccaggtcaagaagcgtttcattgatcaatccgtccatataccgattgatcacaagcgaagattcccccgcctcagcccaattcggcgcaaaaggcggaaccgttcgcgaagcatctccaaagtactcccagacaggccccgaaatcacgaattgcaagccgaaataattgacgatatctttgatgaaatcagagatgaccaaaatgtcgtaaatcggcgtttccggttttcttcttaagccgtagagaccgcacaaatcagtcgccccgattctgatattcagaatgatatcctgataaaagccaagcgttgattttaattcctgcagcgcctttgccctcgtttccatcgccagcagatcaggtgtctcaaagatcggcattccgtatagcacaatgccggattcttgcgacagcttcgttaaagtatcaaggtagtgctctgcattcaacatcgaaaacttcggaaatacgaatccggcaaacaagtgaagcgcgcggccgagcttgttgcccaattcgagcatctgctcaggttcccgcactcggataaacatcagcggcagcacatcgctgttgatgttctgcagtttttgcgcctgataaatcatatcggcctgactgacaagattgttttcagcctgtagaacctcacaatcgccgatcgaatcttcaaggcaaaaaacgaccgagcacagttctggatacttgttattgatgatgacatctgctatatcttttcggttccccggaacatagagcgcagctccaagcgcatactcgagaatgcgcttcggagagtcctttgtaaccgtacccggcagtttgaaaaagacatcttctttttgagaggcggataaaaaatcaaagtattgcacatgggtcaccttctttgaataggaatcatacacccctttgatgtaaaaaaagggcggagcagatctactcccccctttatgttttgcagtttgttattcttcctttgaagccgccgtttgctcttttacagctttttgcttgttcatatagtgaatgataaatgttgcggcaaaagcaataatcagaatgataaagaagacgctgtgcggcatttcaatatgccatacactcgcagccattttcagtgcgatgattccgattaaaacaaaggccgttgtttcaagttcaggcactttgtcaatcagcgtcaagaagaatttcgcaacggttctcatcatcaagatgccgagcatgccgccgatcagaagcacccataccttttcagatacggcaaatgccgccaggatgctgtcgaccgaaaatgcaaggtccatgagctctaccgaaatgacagtcgcccagaagaccccgaaaacgcgtaccatccagctgtcttttttgatggcgtttgcttcatcatcgccctcaccgatgaagaagtgcttgatgacgagccatgccagatatgcggctccgagcagtttgatccaccagaatttaatcaggatcataccgagtccaatgaatagaaatctaaagaagtaggccccgattaaaccgtatgtcaacgcttttttgcgttgtttttccggaaggtgcttcaccatgacggcgagaacgagggcgttatccgcagataaaagcccctccagcacgaccagcgagccgatcagcccccaggaaacagggtccgttaatacttccacccacatttcccaatcgaaaaatgaggcgtaaattgacataatatgatgaaataaatccactttcgttacctcctaatgatgaaaaagcaagactgaatcacgcaaaggtgactcagccggcaaaactagacttgcaggccgtagttgcggcaaagcgatgccaatccgccggaaaacccgctgccgatggcattgaatttccaatctcctccgtgacggtacaattcgcaaacaacaaccgctgtctcaattgaaaaatcctctcccaagtcaaagcgaagcagctcttcatttgttgattcatctacgagccggacaaacgcatttgagacttgtccaaagttctggctgcggctttccgcctcgtgaatcgtcaccgtgatgccgatcttttcaacatgagcggggatttttgagaaatcgacgatgatttgctcgtcatcgccttcaccttctcctgtccggttgtcgcccgtatgaatcacggcgccgcttggatgctcgaggttgttgtaaaaaacgaagtcgtgatcattgatgcatcgatcgttctgatcgacaagaaaagccgacgcgtccaagtcaaaatcggcgccgccggtatatttgtttgtatcccagcctaaaccgatcagcgctttcgtcaaaccggggttcgttttcgttaaatcgatcctttgtcctttagataattgaatcgccatcgatactacctccttaagaaaatgtcagccggaccaacggacgccatccggcgcctgctgtccggatcttcaaaatcagccgacctgcaggccgaaatcggtggcgatcctcgccagcccgccttgatagcctgagccgatcgctgagaacttccattcccctccgtggcggtacagctctcccgtgatcagcgctgtttcaatcgagaaatcttcacccagatcatagcggattaactcttcgttcgagtcttcattgatcacgcgaacgtaagcatttgacacctgtccgaaattttggcggcgagcctccgcttcatgaatcgtaatcacaaaagaaatcttttgaatatcggccggcactgcattcaaattgatttttacctgctcatcgtctccttcgccttcccctgtccgattgtcgcctgtatgtatgacagctccgcctgcgccctcggtctgattatagaaaataaagtccttttcagaagagcacttgccttctgcgttgagcaggaacacgctagcatccaggtcaaaatcagcaccgccgtcatattgattgacatcccagccaaggccgacgacaactttcgacaatccgggatttgtttttgttaaatcgattttttgtccttttgctaatgaaattgccatgttgatctccccatttcttatatgaatgtcaggcgtagcgtttaacgatttccgtaatgctcgtatcgtttgtgccttctccgacagcggtgaatttccactcggcgccgtcacggtaaatttcgcccgcaatcaggcttgtccgcccagaataatcgtcccgcagattgtacttgaccatctcactgcgatcattcatgttgacgatgcgtataaaggcattttcgatcattccgaaatgctggcttcgtttcacgcaatcgtatatattcacgacaaagacaagcttatgaatatgcgaaggaactttttgcaaatctacaatgatttgttcatcatctccgctgccttcgcctgtcagattatctccggtatgttcgatgctgccgcatctgctcctcaagtttccgaaataaatgacgttcttgttctctgtgactcttccgttttccagcatcagcacggatgcgtcacaatcaatattcggggttcctcccccaaacagctttccaaaaaaaccgccgcttccggacgctaccggatcccagccgagaccgactaaaatcttcgaaagccccgcttttccttttgttaaatcaatccgctgacctttctctaaagaaatagccaaactgttcactcctccgttgaatcataaccttaaagatcacagtgctggatgagaataagagtttgaaagatccaattatcacgccagcgtgattcatatctttacaaatacaagaccaatgaatcattatttaacctgcttaactatatatacggaaagattcagagaaaagtttcgcggtttttcgatatttttttatcacattttcatcccggtcaaattatcgacaacaatagtagcgattgcacgaagtcagcgcctttgatatgatgtatctaaaagatatatatcaaatagatatagaaaggcggtttgtatgacaaaaagaaatcacacgacttacgcgctgcttggattgattacggccggctaccgaacgggttacgaaatgaaacgaatgatcgaccaaagtttgaatcatttttggaaaatcagctacgggcaaatttatcccgcactgcgtcaattaacggaagcaggctgggccgcggcttctccggcgctctcggacaaaaagcaggacagaaaagagtacatgattaccgctgaaggtcaaaaagcgctgcagagctggcttgaagaaccgatcaatgacatcgcttcagaaaaaaacgagtttttgctgaagctgtttttcagcaaggaagaatcgcgggagaaaaccgctttgaaagtgaaggagtaccaacaaaagcttgaagaacggcttgaagcatataaagcaatcgagcagtcaattctttcgtgcagctcccattcaaaggacagagagtactggcttttcacgttggattatggaaaacgcaccacctcggccggaattgaatggtgtgaggccacaatcaatcggctgaatggaaaggaagggaccaatgggtaaaacgatcatcaacaagccttttacggccgcccctgaagatgaagtcgttgtatttgtgatcgggatgagagtaaacaagtggcatgctgttcataaatggtggccggtttttaccgccatgccccctatgataaaggagctttatcaaaacaaaaacctcggctttttagcaatggaatcattcatcaatttcaggacgatttgtcttattcaatattggcgttctttcgaagatttgacagcatatgcaaagggtgataaacatatggcggcttggcgccgtttttatcagaaaacagccgcatcaggcgctgtcggcatctatcatgaaacgtattcggttccaaaagggcgctatgaggctttttaccataacatgccggtgttcggcttggcaaaagcgtacggacatcaacctgtcacccgcggaaccaaaactgctgaacagcgaatgcggggaactgaaataatctgaaggggctgtcgttgcgacagcccctttcaacttaaaaagctcctgccccgtcgcctccgcccgctccggaaccgcctgcatcatatgcaccggcgtgctgctgcgaatccggcagctgccagctgtaaaacggataatgcaaacagccggctgcagccatacccagtacaggggaagcgtaatcaagcctgtttgctgattgattgagccacacggcagattcatcctccacttcaagcacaattgcaaagatcatcgttttttcgttttgtgacaggcttctccctgagaacaaatcttcttttctcagatggttcctccaggaaagaatcgatcttcggcagatggaggcatacctgctttctttcacggccggaatgaaggcaattaataaaatagacagcccgacgcatatgccgtaatacaaaatggtatgaacgctgtcggtaaaaacagacgccaaaaacaatccggccaaaaacagaatcgtatacagctttgacttcgcaagaacaatgcctgccgacagtgcaaaaccaaatatgacgcaagccgccatgaatccggcctgatgtaccacatctgcatacagaataaagagcaggagcccggtatggactgaaagcagtgaaagcgacagcattctcagccagcggttttcttgaaacagttccctgaattcaggcgcttgtctgacgctttccgtccatttttgaaccacgttttgaagaatgatcctctttcgttcatattttcccagctgctccttgtgcttgcattcctcctcagtcggcccgctgagggaatccagcctgaacatataggtatcgctgcccgtctgctcaaaaagtttttcgattaagagctgatcaggctttggcaaatctgccttgcttccggagaattcaaattcatatgtgtcatcaggcgccttaggatcgtcgagaaacctctcttcagcctgcaccttctgcatagtgaccaatccccgctgataaagcgaaagcaggccggccaggagatcgcggtctgtgaaacggccttttttgtaaagaaatgcgacaagcacgggatcaaaggactcgagttcttcaaacgaaagcatggcgcggcgtctcttcttcaaaaacgaaagcatgacagccatgatgaccatgaaccccacaatccccgaaaaaatcaaaatcatcctttcagcgccggcaattcgttcatcccgctcagcgtagcgtttcgcctcgtctctctcctccttcagcagctcatcctttgtctggtaagaagggtgccggaccgcctccttcaaggcgctttgcggaaaatatatcctcagctcggagcccgtgcctgcgcgatagagtcctgtctcataggtgaccgatgaatcgttcaccttcgtaatctttccgtttcctttttcacgcaaaaacgcatgaatatcccgtgcctttaccgaatcaggcaggcgcacttcaatctttacgcggccgaaatcggtatttgccttttggtaaaatgaatggatcaaaatcgacgtatcttcaaacttttgtgcggcatcttcgatcacatagcgaaacatcacatttttcgtttcatcctttgatgccgaataagcaaaataagtcccgtcttccttctttgtctttaacgggatggcttgaccgccttttctccggtggtcgggaaggagataggctttaaaattcttcaggcggctcgcggtttcttcgctgaacgatcttgtcgccccttcaaaagaacctttaaaatcgtatctgtaaacttcctctacacttaaatcgccgttttcttttactgttgcgcgtatatcagcccgctcgatcgaaaaggatttgcctgcttcagaaaaaccagtgacgagaaaaaaggcaatgaacataaaaaagaaaaaggagtgcttcatcgtttagtaaatcctttcgttttttgtatctgccttatatacggaaaagcaaggaaattgtttcaagcgttcacagaaatgacagagatgtcaaatttatcactacggtctgccgcacaagccatagaagaaaatgtgcagcatttcctctgtaaacttcctgtttttttcaaaggctttacccaatgtttttgaatgttcaatgatcatattcataaagatgagaaagctttccgcggtgattttggaagagatttcgcctgtccgatgaccttcttcaatcatttggagcataaggggaatgattttttcatcgtattgctgcttcacataatccataatttcactgtcttcgatcatcacctctttgatgaccgttaaagcgaatttttgattattggctgcccttttttgcaaaatcatcaattcaattttttctttaacagaaatatctttgttcatatattcttcaaactcgctgatggactgatcgatataatctttaaaaacctctttcaggagcgcttctttgcttccaaagtaattataaatcgtcacctgcgaaacgtttgcctcttttgcgatatcggttatccggatgcgctttggctcccatgttttgagcatatccaaagccgtctttttgatcttctccttaatcagcaaagcccttttttcaaatccgttcatataaccatccttacttatctttcttaatgaaattataacataaatatatttcattaattttcattgacaaaaaagttcataagaacttaaaataaattatgtaatttataattattaaaatttcattattttcattacggaggttccacatgcttacagttgaacggctcacgaagaagttttccaatggcaaaggtatctttgatctttcttttcatgttcaaaaaggtgaagtttttgggtttttagggccgaacggagccggaaaatcgacgaccatccgacatatcatggggtttatgaagcctgatcaaggcgacattaaagtaaacggaatggatgttttgaagcagcagggcgatattcagcggcatatcggctatctccccggagagattgcatttatcgaaggaatgacgggaaaacaatttctcgatttcatggcagacatgcacggcttaaaagatacagccaagcgcaatgatcttattgaacggctccagttcgatgttcatactccgatcagaaaaatgtcaaaaggaatgaagcaaaaggtcgggattgtcgccgcctttatgcacagccccgaagtgattattcttgatgaaccgacatcaggcctcgatccgctgatgcaaaaagtatttattgaaatcgtcctcgaagaaaaagcgaaaggaacgacgtttttaatgtcttcccacagctttccggaaatcgaaagaacctgtggacagagcagccattataaaagacggcatcatcattgccgtcaaggatattcatgaactgcagtcgatgcagcgaaaagtatttgaagtcacatttgaaaacacgggcgacattcccgccttcatgaattcaagtctgcaaattgagtcccggacggacaaccgcgtcaaagtggccgttttagggaaccatgatcaatttattaaagaaaccgccaaatatcacattcggcacattgatgcttcatcacaaagcttggaagaaatttttatgaactactataacagaaaggggacagcgcaatgaacctctccctgtataaacaaatgctgagaacaaacatgaaaggaatcatgagctacggggtaggctccgcattttatatccttttgatactgggcatttatccaagcatcgcgggcaatgcggaggatattgagaaaatgatcaaatcgatgccggaaggctttctcaatgcttttgggtttgaaaacggacttgggaatcttgaagattttatatctggagaatattacggattaatctttatcgtgatcttatcgatcttctctgtcatgctgtcgacaaagcttttggcaaagcgggtggatcaagggtcaatggcctatattctgtctgcgccgacaacgcgcggaaaagtggctttcacccaagcagccgtcttaacgacaggtcttttgatcattatggccgtgacgacagcggccggactggccggctaccatttgatgctgggcggtgattacgattttaatgtgtcaaggttcctcgttctgaacctgcttggctttctgctcttctttgcagtcggcggcatttcgttcctcttttcggccatttcaaatgatgaaaaaagagccctcggactttccggaggcatcacgttcttattcttcagcttcgacttgctaggcaaattaagcgaaaaaacagaatggctgaggagcctgtcggttttctctttattcagaccggacgatattgtgaacggaagcaccgacatcgctcaagtgtctcttgttctcgccgcagtcggttttgccgccttcgcactcagcattctcatttttaaaaagcgcgacttgccgctgtaaaataaaaacgccgctcccgatcgggaacggcgtttgtctcagtataatattttattcaacgacccgtcttacaactccgttgaaagctttcttccagtacgggttgctcatagaatcgacggataccccgcgtgagctgttatcgttcaggaatgtgccattgccaagataaatgcccacgtggccgttcgttttgtatgtgtcaaagaagaccaagtctccgcgcttcatttcagacgcgctgacagctcgtcccttgccgacaagcgtgcttgttgtcgcaccgaatccaagctctacgcctgctgatgcataagcccagcgtacgaatgatgagcagtcgaagcggcggttgtcgatatcagcttgtgaacgtccgcctccccatttgtacggagatctgccgacaatgcttgaacctgtgctgatggcagcttcaatcgcgtttccattgctgcttacaacagaaccggaagagtagtttcttgacgggctgctgcttttcttgctgcttgaagaaccgctgttggacgatccgtcagatttgctgactgaacctgaatttgagcttgatgaagatcctgaatcagacttttcagccgtcgcagattcttctttcgcttttgctgctgcagccgccgcagctctttcttctttaagcttttgttcaagagcggcttcttcttttgtcagagagcccgcttcttttttcagatcgctcagctctgattctgctgccgcttgcttcgtttgcagctgcttagaaaggtttgcctgttctttcagctgtttatcaagatccgatttaagcgtttttaaatcggctagtgttttttggatttcgtccagttttgtatttaaatcagacattgctttttcaagcttgtttttatctttctcctgctcgtcaagcaggtctttgtccgcatcaacaattgttgaaacagcagttgcacgagtgataaaatctccgaagctttgtgcgcccagaaggacattcaaatagttttgggatccgccgttttcctgcaggctgcgcacgcgatttttaatcacttttgaacgctcttcaatccgtttttcggtttctttgatttcttttttcagagcttccacttcttttttcgtttttttgttttctttttctttgtcttcgattttgttgcttgtttcaagtgcttttttatcaagctcttggattttaccttcaagctttttctgctcgtcttgcagcttggcgatttctttccgcttgctctcgatgcctgaattcacttcagaacgcttttgctgaatttcttgtttttgctgagatgtttctgccgatgccgtgttgttcataaagggggtaaatagactagctgttccgagaatcgacgctaaaccaaaagtataaacctttttcttcactttctactcctctttcctttatgtattcttgttttttcattatgtaaattcgattgaacattattaaaaaatgaatcttatgacctatgatttatatatccgtttctaatgtacagacgttattataccatctattttcgacaataggcgccaatttatattacatttatatttcgtttttgtttcaacggtgtcatgttttgactaatcatgttttgtctctcgtattctcttcgatttgaccctatctgctgtttttcatatgcttgtcttactgaacaagaaaacgaaaggaaggccggtgacaattgatgcagctcagcattcttgaccaggttcctatatcaaaaggctcggatgcgcattcagctctaaagcattctgcagagctggcggaacttgcggatcaatgggggtacaaaaggtattggtttgccgagcatcacagcacacgggggcttgccagcaccgctccagaaatcatgatcgcacacattgcggcaaagacggcgaatattcgcgtcggttcgggcggcgttctgctgccccaatacagtccctttaaagtggctgaaaactttcggcagcttgaagccctttatcccgggagaattgacctggggatcggccgctctccgggaggcacaactaaaacgaggctggcgctgacagacggggttcataaaagcctgcacgaattcccgagacagttacaagacttggttagctttctgactgattccgtgccttccggacatgattacttcggaattaaagcctcccctttgacggattcgcccccggaggtgtggcttttaggcctgggagaaaacagcgcaaaattggccggtagcatgggagcgggatacgtattcggccatttcatctctcccgcgagaggaaagaacgcctttcaatcataccgtgaaagctttcggccttcccctttctttaaacgcccccaatcattggccgccgttttcgtcgtttgtgcggagtccgatgaaaaagccgaggagctctgcttgagccaagatttatggcttctccgggttgaaaaagggctggacagccttgtcccaagcattgaagaggcgaaatcggccgcttacacagctgccgataaaaagaagcttgcccaaaaccgcagccgtatggtgatcgggtctcctcaaacagtcaaaagaaaactgctcgagctttctgaacgatatcaaacagatgagtttatgattttaactaacgtctaccggtttgaagataagaagcagtcttacgaaagactggcagaattattttgaacgaaaaacatcccttttcaaaaaccgttgaaaagggatgtttttgttagaacgtattatagacattctcacactcttccgctgtcggctcgtaaaaacaatgcgatttaaagcggccgacatgcggctgattgtaccactgtgcgggacacgcccccgccggtctgaaataccacaaactgaactttgccggccaaagccgctccccgttgaccgccctgcgtgccaaacgcctttcgctttcccgcgccctttgatagaaataaccgtgcgtcacggcttcaaaggcatgcggctgatggatcatttgcggaatggtgcgaagtcccacaaagtcggaacagtttgccctgatgcgattgattccgacatttccgaccataagcataccttgcacgccctcgccttcagcctccgctctcaaaagtcttgccaaaagactgatatctttagaagaagcctgaacgactgccatttttagtcacccccatgatgtcgtcacctttatcatattctgtttcatttaggtgatgacgatttcgggatttatctttgacattgcccatgaaagaaagctattcttctattatcagaacccgagaaaaaacaaaggggaacggagggatcgtgaattgtcagtattaaaaagccctgaatgggtatacaaacgattaatggaaaaaacggaccaaacagttattgtcgacgtgaggtttcatttgacaaaaccggacgaaggccgaaaagcgtatacgaaaggccatgtgcccggagccgttttcattgatttaaaagaagatctgtcgcgcaacccggaagagcacggcggcagacacccgcttcaagaccctgaccttctggccgcgaagcttggaaaaatcggcattgaccggcaaacagatgtcgttgtttatgatgacagcggcggcatgtttgcagcgcgcttttggtggcagcttcactatctcgggcatgacagcgtctatatcatggatgggggactgtccaactggatcaaagcgggctacgaggtgaacgccgaggatcctcgtcctagcgagcgcgaatttaagccggcgctcagagaaaacgaactgctcgatgccaaagaagtactgaagcgaatcggcagagaaggctccattctgatcgatgcgcgcgatccttcaagatacaccggggaaaccgagcctctcgatcatcgggccggccatattcccggcgctaaaaactttttttggaaaggcaatctaaccgaaggcggattatggaaaagcaaagaacagctcagacagcattacgctgctttggacccgggcagtgaaatcgtcgtctattgcggatcgggcgtatcagcctgcccgaatgtactcggcttaaaagaagccggatttgaaaatgtgaagctgtatgccggcagctggagcgattggatcagctacccagaccatccgatctccactggagccgaggacgatatttgatcttacaagaggcggcggccgggggcttttccaccccagccagccgccgtttattatatgtttttgctcataaacgcctttccgtcatgggcatcgataaagtaagggtataccggccggtagacaagcctgtagaagtcatccttttcccgactgtagtccctttcccactgcagcttcacatcaaatgccgctgcaaaaacggctttcgcttcctcctctgaaatggatggcgaaggactcagatcgatcagcgtttccggctcgatttccgggccgtgataaccgacgaccctgccggttgtccgattgatgctgatattggcagagccaagccttaacggcacccctttgtattgaagatcaaattgaaaaaatgcgtttgacctgtccccgtcattttccgccggatgcattcgaaaaagccgatcagcgtcgggataaagcctgtacaaaaattgcagcgcccgtttcaagcagtcttccccgctcaagacagggggtccttccgatttgataaaagaagcgattcctttgagcttccccgagtttttgtctttcacgattttcaacgtattttggttccatgtttcaaagtagccggctatactccgatctctcggctcagggtcgtctcccaggcgccacactgttccaattgactctcccaaatcggtttcgcggatttttcgcatcgaaggggtaaagccgatcatgtcatcgatatcagcatgacggtcagcctcaggcagcacagggagcggcaatgtgtcttcttcttcctcgtcatcagccgcaggcttcatctggcgtttttccgtgatatcggcgggatagctgaaaaacggcaagtctgcttcgtaaataagatgcgggagatcatctcccccttcataaagttcactgcggattttttcaaccgccaattcgaattgaacatgttcaagataatcggctgttaccgattgcttatcagctatctgctttggaatggagaaagagctcgtcccgccgttatagcgaaactcaatcacctctccgttcttggcgacccggacataaaagcccgtctgcggcagcggaagatcaaggacagtctgaacatacgtaaaacgaacgaattgttctgttaccttcttttcatggaaaacaaattcataaggcgcattcgggtaatgctgttctgtaaactgaagggcgatttgcagcagcctttcatcaggaagagcttcctccaccaccggttcatactcttttgtcaaactgattaagcggccttgatgatctaactccaccgatatgtcccgctccggctcttcaatgtcctgccaagcgaaaaaaacccgcctctctttttcgtacttctctccgtaatcttcgatcatgagctgataatgtgggggaaccttactgatggattgcgctttttgttttaactgttcacgaaccaaatcctgtctacctctctttcattttcttctccttatgtatacgaaatatactatcaatcgtttcatgaaaattgagataattggatttaactggtgaacttacatgacattttttaacctgacattaaaatatctcattccttttgttgtgcctttcatctcaaaaatacctttgcggatcagctctaaaatgcggtactcgataaattcatctccgatgttctcctccagatggccaatgacttcgccgatcaagctgagacagttgataaaggtgttggctgaacggtttttttgaagctgagccagtttttcgattatgaacgaatcaaaaaaatcctccttcacgcttttgattctaccgtcttcccatacccgcaacacgcttgtctgctgagacagcgctgtccattcctctgcaaggcgccgtccttcagcggctgtcacagccgcctgatccccttgttcataaatgaatctcaggttttcatcattcaattcaccagaactccgggtatgggggaagaacttcgtcgtattcaaatggaaaacagccaggttcatttgtcggaggatatggtgtacaaacctcagtccagtctgttcgtgtgcatgatctcctgtccatataaagacagaggcttgctcaggaatgccggacaatgcagaaaccgccacttcaaaacggctgtatctctttccagactcgtgaaatcggtcattcagatatgttttcaaccattcataacgattgaccctgccttctttggcttccagcttttgaagcggtccgatggaaaataattcaggcagaacgatcagactcttttcatgggttcctcccgactgtttgagcatcatgtttatactgccgccggcagactcgccgaaggcaatgtgaacgatattgttttgcatcataatctccttttattgaaagttgtaatagcaacctgatcagcgcgatgcacggtatatattaaactcgtttcttttactataaaataaaaggtaacacaattaaaaaagcccccattccgccattcaataaagggcagaacgggagctgaaaaaacggcctttgctattccagctgtgatggatacagcgtcatgccgccgtcaacgaataaagtcgcgcccgttacataggcggcttcttgcgacacaagccatgccgctgcggaagccacttgttcaggctcgccaaattcgttcatgggtatctttttcagctgttccgacttgcggcttccctccaagtcttcattgctttcggtcgcaatcgttcccggcgcaatcgcattgacgcggattcctttgtccgcatagtctagggcaagcgtttctgttaacagcttcattccgccttttgaagcggagtagtgaacatttttcggtctcggaatttgctgatgaacgctggatatattgagtatgcttcctttcatgcggcggtccgccatatattttaaggcttcgcgtgcgcagagaaacgcaccggttaaattaacgtcgatcactttctgccactcatcaagctcaagttcgtgcggaaaggcgcccgcgccgttaaatcctgaattattgaccataacatcaagtgaaccaaagtgttcaactgctgaattaatcagctttttcacgtcctcttcggaagacacgtcagcttctatcgcaagggcgtttccgcccgctgcttgaatattgtcgacggcttcccgtgcgcctccgggatcgctgtgataattgacaaccacattcatcttttcttttccaaaccgttctgcaaccgccttgcctataccttttgaagagccggtcacaattgctgtttttccttttaaatcactatacaacctaaacacccctcaatttcttttctccatgtacattacccggtatcaatatgatcaaacaaaatgttaatacacacctttagtatgatcttttttaaacatatggaaaattcagaattattttgttaatatctaacttgtacttacaacaaaataaggaagtgatatgatttggttagtaaaaagagtgttaaacgaggtttgatcacaggtctcattggtatttctatttattctttaggtatgcacccggcccaagccgcgccatcgcctcatactcctgtttcaagcgatccttcatacaaagcggaaacatcggttacttatgacccaaacattaagagcgatcaatacggcttgtattcaaaagcgtttacaggcaccggcaaagtgaatgaaacaaaggaaaaagcggaaaaaaagtcacccgccaaagctccttacagcattaaatcggtgattggttctgatgatcggacaagggtcaccaacacaaccgcatatccgtacagagcgatcgttcatatttcaagcagcatcggttcatgcaccggatggatgatcggtccgaaaaccgtcgcaacagccggacactgcatctatgacacatcaagcggttcatttgccggtacagccactgtttagccgggacggaacgggacaagctatccttacggctcagttaaatcgacgcgctactttattccgtcaggatggagaagcggaaacaccaattacgattacggcgcaatcgaactaagcgaaccgatcggcaatactgtcggatacttcggatactcgtacactacttcatcacttgttgggacaactgttaccatcagcggctacccaggcgataaaacagcaggcacacaatggcagcattcaggaccgattgccatctccgaaacgtataaattgcagtacgcaatggacacgtacggaggacaaagcggttcaccggtattcgaacaaagcagctccagaacgaactgcagcggtccgtgctcgcttgccgtacacacaaatggagtatacggcggctcctcgtacaacagaggcacccggattacaaaagaggtgttcgacaatttgaccaactggaaaaacagcgcacaataatacacgaagacagcccgcttccttttggaacgggctgtcacatctaacggccgtatacttaatttcctttaagcctgtactttttgccatctattgatatcgtgaaatttgaaggaccgctgatcggcaaataatagacaagctgaaactccgcttcctcaccaggtttaatggttttccagattgatagagtcactctgatgcggtggaaatctcctgtcagtccgccaatgttcggtcccgtatgccctttagaaatcacttcaacatgatcgccgctccagcttctaaaccgaggggaagtggatgtcggcgcatcaaattcgataaaagaacctcccgtaatcgtgacatcgctgttgttgatcagcttcatcaccgggtggatcgggtaattttgatctcctaacggaaagttcgtcaactctacttctgcatctagtgattcatcaggcaaaggtgatgtgctgagtcgattatcgtatggtgttgtatccgagaatttatgatacatcgttctcgttaaggtattgccgataccgtattctcctttactgccgtttcgttcgggataccagtcataatcaccgctcaaatcccaaaacatgacacccccgattcctttatcaatgacataatccgccttcgttttgatcgattcctcatcctctgtcgatagaaatactttcttttctggattccaaagccaaggcgctgccagccctgcgtcataatgccttttataaacgcctgtcaaatcagccttgctcaatccatacctttccagataagaaccagcaatgcccttttcaaggtttttggcgtgccacatcgggtttgcccctgctccaatttcattcccctgctcatctttatcgtgccaaatattatcgattccggttgctccgtcaccgcattgcctgagtccctgagggcaatctgcgcttttggctcttccccacagcccatttgctccgccggtcacatttttccagcctctcgtataataaggcacaccgatattgattcgtcccgattctactgcccctctaaaataatggtaagcccagtccgtatttaaatatccgatcccttcgtattccggcgtagtataaatgttggactgcttgagttcggcatcttcgccgttatcgaataaagaagcgttcggtccgacaaactcattccaggctccatgaagatcgtaggacatgatattgacataatcgacatatcgaagcggcttaaacgtttccatccccctcagtaaatatgccgaggatggtgctgcaatggtcagcatgtagtactttccatcttcagcgaacgcttgatcaagcttttctcttaatgttttcatcaatgcctcgaagcttttatttaatcccttgcgccgcggattggcgatgttccaatctgccggattccctgcatcctgcatcgatgtagggtactcatagtcaatatcgattccatcgatctcatattttctgagaaacgcaacgaccgattccgcaaaggtgtgaatacccttgtggtttacagatccatctccattcgttgtcatcgagtaaaagccgccgcttggaattcgctttccgtccttgtcgacatagccgccggtttcggcccaaccgccgacagcggccaaaaccttcacatccgggtatctatctttatattgatggataaggttaaaatgccccttatacggcaaggtttgatccatttttacatcgggatgctccggccaagtcatcccgatggacgggttgttctcatctgcctcttctccgactgaaatccgatgatcttccccgatgtgggcaaacgcataattaatgtggctcaagtacttccaggggatatcgcttactaaataacgatcttgatttccttttcccgtacgccagctcgtaaagtaaccgatgattctccggtctaactgattggccagcttttcacggccgtccttgtcgtatacatcgcaatacggcacatgttcaacgcccgagtcccatagcccttccggacggcagtccggtctttcgcttgaagtctctgcggaaatctgccggttcgggataaaaagcgcgaggagcagcatacaagataaaaaagatgaagcggctttcttcatgtttactcagactcctttgtccataaagagagacgtgagaagctgttccccaaatctctctttatcgttttctatccatttgactttctcttattcgcagcctccgatcagccgccatacgccccattcaccggattgatcaggccggtcgcctttcgtccaccatttcgcttcatacacttttccgttaaatgcaacccgctctccgcctgtgtatgcgctcgtctctttccattcgtcatatgaacaggcttggtcagaattcgtcgtgacctctaccgttggtccggcatggagctttccatccgcatcctttgctgaaacagtaaatgagtaggccgtacccggcttcaagccgcctatttccgctgatgtttcttttacagatatcgaccggttttcaaatgacacgacatattccgcaatgtttgctccgctgctcggcgcatcccacgccaggctgacacttgtagcagtttttccggttacacgcacattcacaggtgccgatgaaggcggctccggattgcctccgtccggtgcaaaatctaaatcggctgccaatttattgagaagcgtccgattggaatcgccgctgaaatcccagaacattgctccgcttaatccgtttgctttaataaaatccgttttgtggccgaatgattgttcatcatcataagtgatgaaattgccattttccgcattatacaaaaacggcacttttgcttgatcgttccaataccttttatagccgttttgattcacatagttcctttcaagatctgaaaaatcgaatacgcccttttcccatgtcccttctttagccggtccgcatttctgatattctccgtgcccccctggttcacaaccgctccagccccttccgtagaacggtgttccaagcactaatttgtcacccttgacaccggcttccttgtagcgtttcacagtgttttcaatattgtaggtctcagcgtttggaacgcctgcttctttcgcttttggatcatagaacagcggtgcattatgggcgcttatgctttgccatccgccattaaagtcataggtcataatgttaatccaatccacggtttgagcgattttatcgagctcagtgttgcttacataatcgggacttgcgccggatgcgatcgtcagcaagtattccttgccgtcttttgcttctgcagcgtcaagttttttgcgcacctcttgcaggagcagcgtgtagtttcttttatcttccggacgtgtgctgttccccggcaatcctccgctgaccggatattcccagtcaagatcgaccccgtcaaacccgtatttccttaaaaactcaacggccgaagcggcgaaattctcccttgccgcaggatctgccgcgacatctgaaaagcggttagaccaagtccaccccccgaccgatatgaacgttttcaaatgagggtggctctttttcagcttcaacaattgtttaaagttgccgcggatcggttcatcccagacatccccgggatttgccttttgtgcgtcaatccagggatcgcccatcacgattgttccatttggcgcgtcgatcactccgttttcatcctggcatgaccacgtttgaggattggggcctgtcggatcagggttcccatgccttccctcccagcaaatatcagcaaaggcataattaatgtggctgactttcgaaacgtccatatcccaaacttgaaaatcccttccataagcaccccatgatggatagtagccgatgattttatagttttttccggaatcggcttttgcaacttccccattcacaaatgagaggctcagcatcataacaaaaatgaaagaaaaaacgaaaaactttttgcttttgttgatcaacacgattttcatctcctttacaagcaattttttggcaagctatgaaactagaactctctttttcctcaccgccttttttgctggttttatatttttccttgtcatctaatagcagcagatacattgaagacaacaagggaaaacgcttacaaaagtgagatcgacagcatggtttcattaaaattttggcgtttgaaaagctggttctgcagagggtgaaacacgtatagacgtctatacatttaagtgtaaaagaagactttccaatgggtgaagaatgcataaatttgttatgacaaatttatattaatcagaattttctgaactgtcaacatgaagtaattgaataaaacaaccgccgctttctaccccatttcacatcttattaagccaaggaatagaagcggcatctctttcatagaccggcgtaagacgtgaggcgaatatccggacagtgttgtaaagcggctttgagagaaggttccgtcagcagtgaaagttcatatgcccgaggataatggaaggacgatttttcaagcagacatttatcgacataagccggatggcacatcacttcaatcacagctgcgtcttgataatcattaaagaaactcgatagatccttcaatcggtcgactttcagctcaaaagcatcgttcgaccttacacccttccacagtgaaggatggtcatgattgacctttctgcaaggcagatcatactctttcgcaacctctacaaacacctcagggagatttccgtatgtatgaatatgatgatggctgtcgatatgtgtcggatttaaaccgcaggacaaagccttctctatttgcgctttccactctcgatatacttcctcaagatcaatgtcgaaaaaaccttggtaatacaaaagcttgcgaaaattcccttcttcatctgttatcgtatgcagtccgccaagaatcggacgcccggccgtcaatgtcaagtggatcccgactccgagttctggattttgccgtgcgagttcgacggcatgatccgcttcttgcatattgaccatgagggtagtcgatgtgaggaccccgtgctggaaagcttcaataatgccaaggttgactccccttgaaaatccaaaatcatctgcatttatgattagagatttcacgctttcatttccccctttgtccataatcgcgttcaatgaagaactcaacgcggtcaccgcgaaaataggccatagaatactcgacaacctcttcagacgccaaaaatgtttgcgtcgatatctggaagcaaggcgtgccttgtgtaatatttaaatggtgtgcaatctcctcatcagaaatcacaatcttgatttgctcctctgttcttttaatgttgtttccctgcctgctgatgcactggtaaagtgagatattcgccatttcttccgttacttcgggtacgagatccgttctgatataggctgtttcaaactggatttcttcatcgtctgcatagcggattctttttacttgatagaccatttgttcagcgtcgattccgagacgggtttggagtttttcggacggctttattttttgcaaatcaacaaccttgattttcggtttaaagccttgagccttcaattgttctgcatagcggaggctgctggagcttaagatctgctttacttttcctttggcgacaaatgtcccttttccctgctttcggtaaatagccccttccataagcaaatgattcagcgcggtccgcagcgtcgtccggctgacatcataaattttgcaaaactcggactccgtcggcaacaggctgcccggcggataataaccgctttcaatcttatctacaatatcttgtttaatttgactgtggagctgtggttgtttcgccatacattttctcctttggggtgagttcgtaattatagaataacacaaaaagttcccccaaaaaacaatttgttataacaaatatgtatggacaaatttgttataacatgttaagtttcaattgtgtgaagcgctttcataaaagagagttaaggagggggattatggcgctgaaagtagttgttataggcggaggttccagctacacaccagaaatcattgaaggcatcatcaaacggcatcatcaatttccagtgaatgagattgtactggttgatatcgaggagggcaaagaaaagcttcgcatcgtctcagaactcgcgaagcgaatgatcagacatgcgggggttcccatcgaactgagccatacaatagatcgggcaaaagcattgaaaggcgccgatttcgtaacggttcaaatcagagtcggcggactgaaggcgagagctttagacgaaaaaattccgctcagccacggcctgatcggccaggaaacaaacggggcgggcggcatgtttaaagctttgcgcacaattccctttatgctggatatcgcccgcgatattcatgagatttgtcccgaagcatggctgattaactttaccaatccggcgggcatcgtgacggaagctttgctgaagcacggacctcatcaaaaggtcgtcggggtatgcaatattccttacaacatgaaaaatagcatcgcagaaattttcggcgtggatgtaaacctcgtcatgattgaattcgcgggcatcaatcattttgttttcggaaaaagagtttggatcgacgggatcgaccggacagaagagacgattgagcttctgttgaatgatcacttcggctactcgccttccaatattgcggcgctgccgtggaatcgccaatttttgcggtctttgcgaatgcttccgagcccttatcatcagtactattatcaacatgaagatgcgctcgcaaaagatatcgaagcgtacaataacaaagggacgcgcgcagaaaccgtcatggaagtggagcggcagctgtttgagagatacaaagacgccaagatccatgaaaagcctaaagaactggaaagccgcggcggagcttactatagtgaatcagcctgctcattaatgaactcgctttatcatcattcaatggatattcagaccgtgaacacactgaataaaggaagcataccagaccttccagatgatgcggtgatcgaagtcaacagtgtcattacaaaaagcggaccgattcccctgaccgtcggaaaactgcccgatgccatcagcgggccgatcatcttgatgaaaaaatttgaacaattagtgattgaagctgcggtcaccggcgactacgatacggcatacttagccatgatcaccaatccattggtctcttctgatcacaaagctcaaaaggtgctcgatgaaatgctcgaggctcataaacgttatctcccgcaattttttgaggaggtccgtgcacatgaaacaaaataaaatgatggcattcatcgaatcaaacatcatgccgatcgccggaaggatcggttcccaaaggcacctgattgcaatacgcgacggattcatcgccattatgcctcttatcatcatcggttccctcgccatcctggtcaataattttccaataccggcgtttcaaaactttatgaccggtcttttcggcgagggatggacggctgtcggcggagcgatatggaatggctcttttgctctgttgagccttttagccgttgcggctgtcagcttcaagctggccgagtcatatcacacagatggtctgtctgccgcattaatcggggttggcgcattcgccgtgcttacaccgaccactgaagactttggcttctcaatgacttggctgggagcccaaggtctgttcgtcggcttaatcgtggctttgctgtcgacagaagtcttccggctgttttccaaaaatgagaaattgaaaatcaaaatgcctgaaggagtgcctgacggcgtcacaaaatccttgaatgctctattgccggctgccgtcatcttatccactgccgggctatgtaacgctctgatcgttcacttttcggggcaaagcatccatgagcttgttttcagcacgattcaagagccgcttcaaggcctttccaacacggttgggtcagccttgatttttactttcttgaatcatttgctctggttctttggattgcatggaacaaacatcctcgggccgatcatggaatccgtctacctcccgctcattcaggaaaatcagcacttattctcgcaaggaatgagcgcttttgaagtgccgtatattgtgacaaagcctttcttcgattcttacgtatttatggggggatcgggaacaacattggctctgcttgccgccattttaattgccgtgaaatcgaagcactacaaaacgataggaaaggtgtctctcgcacccggcctttttaacatcaatgaacccgttctgttcggccttcctattgtattaaacccgatcatgttcattccgtttatcttgattccattaattttgacgattacatcatatatcgctttggcttccggtctcgtcccgaaaactgtggcgatccttccgtggacgacgcctccgattgtcagcggatatcttgtcaccggaggatcagtccgaggggtctttttgcaaatcttcaacctggtgctggccaccctgctctacctcccgtttataaaagcggctcaacgttccgccttgcaccagacagaaaatgaataaataaggagtgaatgttatggcagatacacttcaattggaacaggtctcatttgaaatcatccttcacgccggaaatgcgcgttcttctgcaatggaagcgttgcaacttgtgaaacatcacgaatgcgaaaccggttatcaaaagatacaagaagcagaatcggagctgaaccaagcgcatcaggcacaaacccgcctcctgcaaaaagaagcacagggcgcaggcctttcacccaatctattattaatccatgctcaggaccatttaatgacagccataactgtaaaagatttggcgaaagaaatgattgatttatatcaagagcttgggaaaggaagagaaaaatgaagatcgcacttgtatgttcagccggaatgtctacgagtatattggtaaaaaaaaatgcgggaagaagcggaaaaccgttcattgaaggcggaaattaatgcgtatgctgaggcagatttgccaagcgatctggatgaaattgatgtgatactgattggtccgcaggtccggtatttaaaagggcaaatgacagagcgtgccaagccgtatcatacacccgtggccgtcattgaccaaatggcttatggaatgatggacggggcaaaagtgcttaatcaagcaatcagccttgcaacctgatgctttccgcaaagaacctcgtttcctttgaaaacgggttcttttttatatttgaagtttaaaagaatgattttttgaaagcgtttgattttgtataataattggtaaaggatgtgatcatacatgatttcctcacaagtgagatccaagctgattgagattgtcggctctgccaattatgacgattcgaacgccggacggctcgtctattcctatgatgcgacaccacagtttcaatcgatgcctgacgcggtcattgccccgcgcagcaaggaagaagtatcgcgaatcgtgaaaatctgcaacacgcaccgcattccgattgtgccgagaggttcaggtacaaacctatgtgccggcacatgcccgactgaaggggggattgtcctcctgtttaagcatatgaatcaaattttagaaatcgatgaagaaaatttaacgataaccgtccagcccggtgtgatcacacttgacttaattcacgccgctgaagaaaaaggattattttatccgcccgatccgagctcaatgaagatctcgacaatcggcgggaatattaacgaaaactcaggcggcctccgcggcttgaaatacggagtgacccgcgattatgtcatggcgctggaaatcgttcttgcaaacggggacatcatccgcaccggcggcaagctggccaaagatgttgccggctatgatttgacgcgtctgttcgtcggttctgaaggaacgctcggcgtcatcactgaagcaacattaaaactcatccccgcacccgaaacaaaaaaaaccgtcctcgctctctatcaagatatcgactctgcagcacaaactgtttcaaatatcattgcacataaaatcattccgacgacactcgaatttctcgaccaacctacgattcaggtgatcgaagacttcgcgaaaatcggccttcccgtccatgccaaagcggttctcctgatcgaacaggacggcaccgaagatgcagttcgccgtgatatcgccgtgattgaagagatttgcaaaaaaggaaatgctgtgtccgttcaaactgcgcaaacagaagctgaagcggaaaatcttcgggaggcccgccgcaccgccctttcggctttagcgcggttaaagccgacgaccattctggaggatgctacggtaccgcgttctgaaattgctgaaatggtaaaagcgattaattcgatcgccgaaaagcaccaaatatcgatttgtacattcgggcacgcaggcgacggcaaccttcatccgacctgtacgacagatgtcagaaacagtgaagaaatgaaacgggtcgaacaggcttttgaagacatctttaaaaaagcggttgaactgggaggaacaattaccggagaacatggggtcggcgaaatgaaagccccctatttggaactgaagctgggcaatgcgggaatcgccgccatgaaggcggtaaaacaggcattggatccaaacaacatcatgaatcccgggaagatatttgcgaaagactcccgcaagcgagtggtggtgacaagatgacgacagctgacgaaagaaaggtcattgaacagcagtttaaacaaagaatggatgaggaagagctgctgaattgcatgcgctgcggcttctgtctgccgtcatgccccacctacatcgaatccggttttcaagaaagccattctccgcgcggacgcatcgcgctcatgaaagcggtcgtcgatgggacgatcgagcctgatgaggatgtcgaacggtcactcgagctttgcctcggctgccgcgcgtgtgaacctgtttgtccgtcaggcgtaaactacggacgcttgcttgaagaagcgagagatattattcagcagaacaaaaagcacgcctttccggttaaagtgcttcgccgcgcagtattcaaagggcttttcccccatccaaacagaatcagggcgctgaccggaatgctcggcttgtatcagcgttccggcatgcaaaacgtgattcgcaaatccggcttgctccggcttttgccggaccacctcgcgaagatggaggcggttttgccgaaggttcctaatatgaaacagctgaaaaaacggccgcacctgctccctgcgatcggggagagaaaaaaacgggctgcctttttctcaggctgtctcatggatacgctgtttttggatacgaatatggcaaccattgagctgctgcggctggctggctgcgagatcataattcccgaacagcagacctgctgcggcgccctccacggacacagcagcgaaaagtctgaggccatcctgctcgcaaaacgaaatattcaggcattcgaggattcaaacgcggactttatcataacaaatgcaggcggatgcggagcttttttaaaggaatatgatcatctcctgaaagatgactccgaatggcgggaacgggcagcatctttcacaggaaaattgaaagacttttcttccgtcttgttggaactgaacttcgatcagcaatcccttgaactgccggagcaaatcgtcacataccaagattcgtgccatttgcgaaatgtcatgaaaacgtccgctgagccgagacgccttattcgcagcatcaagggcattgaattcaaggaaatgaaaaatgccgaaagctgctgtggatcagccggcatttataacattgtcgaatccgaaatgtcgatgaaaattctcgatactaaaatggaagcagcagcagcgacccgggccgctacgatcgttacggctaatcccggatgtctgctgcaaatgaagctcggcattgaacgagcaggacttacagaccgagtgagagccgttcatctggcggatttattactggaagccgtccagaagtgaccagactggctcacacctgtatatttctcgggaaataaatcgaaatatgtcctttgctgctatttccggacagcaggaaattctccattcggctggatgaagcgcaaacctgttacctgtccggaatcgccggcttcaaatcggacgctgaatcccggcagattttttatttgaaatgtcaactcacggtaaggttcaagttcgtaatcaggctgaccgggcaatgaaacccagagcgtccggttgtttctgagagacacaacgacatctgttccgtctcccaatgcatacttccctgttaaagaagcaagaaattcagggtcgtacaattgctgatccggcttcctgacaaattcgatttctctagcgccttccgccatttcaaacggtatggaaaggcggctgatatgtccgtgtatatcggtgtcgaatgatgcgagcatcgccatctccgtgagcggcattttcatctcgaatatattgtaatgataatgcttcaaaggcatcacaaacgaattgaagagcgcctgtaacacgccgtctttaagctctattttgatttcgccgtagccgggatgctcatatacacctgtgtagtccttcagggcatgagaaggattcgttccttcaattttggtaagatccgcggttcgatccactcctaaagcggctttcattattttttccgcttcgcctttcagccggccgctccaatcgatctcttccaatccaagcaagcggtcaaaaatgttgtacgccagaacatttggaagaaagctgccgttcatatttgtcaaaatgacaatgccgatcttttcataaggcatgaaagcgacaagcgatgaaaagccgtcgatatttccgccatgatgaatcatatggcgaccgcggtacggttccacaaaccagccgagtccatagctgcagaccggaagctccttcgctttaataatggagtcgcaggaaatgcaaggcgtatgcagttcatgaaggcttccatctgataaaaccccgttgaatttctcgctgccaagctgaagaagcagccaatttgccatatccacggcattggaattaatcgacccagccggcccgatcgcatcgatattacgaaaaggtattttttcaaccgttccgttgttctcttgatatggaaaggcaaaatcggaaagcttttgcatatcttcgaccgaaaagctgctggatgtcatatgcaaaggtttgaaaagccgctcatgaacaagatcctcccatgtcgtccccgctattcttccagcaagataaccagccgtcatatacatcaggttctgatactgccactttgatcgaaaatcctgattcggctcaaggtagcggatccgtctgaaaagctcctcccttgaaaaggaggaattgtaccacatcatttcgtgtcttgggagaccagaacgatggcacgcaagatcacggggagtcatccgttcagttgctaccggatcgtgcatcttaaactcagggagatattcccttaccggcttatcccactccattttcccttcatcagccaataccgccatcgccgccgttgtaaatgccttggaggcggaaccgatcgcaaataccgtttccgggttgacctttaatttccgttctttatccctgaatccaaacccttccgccatgatgatctcgtcttccttaatgactgcaaccgcggctccaggaacgttccactctttcattttttcttcggcgaatgcccgaaagccttttaatgcctttaatgactgtttcatcttactctcctcacttgatttaagagtcttatgacggttcatggtgtccgtatttcatacgtttgttcgcccaaatggtttcatttagaaaaaatttgtatatttattcacgaattccaaaagataggtataaggcttaaaatgtctaaaaaacaaggaggtactgttcaatgtttggttttatttggtcattgatcattggcggaattttgggctggctggccggcctcattatcagacgtgatgtacccggaggaatcattggaaatattattgcgggatttatcggttcatggctcggctcgatgattttggggcgctggggtccggtggtcggcgggtttaatatcataccggccttgatcggggcgatcattttgatcttcatcgtcagcctcgtcatgagaagcatgggcggtcgaaatcgcaatgctcaataagcagacggtttgcgacggtttctttagaagccgtcgttttttatttcattatgctgccgtcttttatataattaattagaaacacgaaatattttcaaggggaggctgcacattggaaaaagtggcagaaaaaagaccaaagcgctgtgaggtgccggaggaactgacttggaatcttactgatttattttcttcttatgaaacttgggaagacgcacttgtgaaaattgaggaagatctcgcatccatcggctcatttaaaggaaggctgcatgaaggagccggcgtattgctggattgtttatcgctgcgggagatactgctgaagcgcctagtccgggccgccgcctatactcacctcagaaagtccgaagatttgacaaaccccgtcaaccaagctgatgcttcaaggatggccgcgctgcaagcaaaaataaacgccgggctttcatttatccaatcggaaattcttgaattccccgaaaatcaagtggagacgtacataaaaaacgagaaaggactggagcctttcagcaaaatgctgacggagataatggaactcaagccgtataaacttgctcccgaaacagaggaagcgctagccgttttaggcgaaatacatgatgccccgtacaaaattttcgggatggcgaagcttgcggatatgcaattttccccgattcaggaccgaaacggcaatacactcgccaattcgttcgcgttatatgaaggaaaatacatgttctctcctgatacgcatattcgcagaaccgcattcgactcctttaccaataccctgcaaacatacaaaaacaccatcgccgccatctatgaaacagaggtcaaaaaacaggtcagcatgtcaaggctgcgcggatatgaatccgtcacccatatgcttcttcagccgcaaagcgtcacgctcgaaatgtaccgcaaccagcttgatgtgattaaaaacgaacttgcacctcatatgcgcaagtatgccgccttgaaaaaacgcgtattagacctcgacgaaatgcgcttctgcgatttgcaggctccgctcgatcacgacttcagtccaaagacgacttacgaacaggccggccggatgatcttggacgctttacaagtgatggggccggagtacacggaagtcatggaaaccgccttgactgagcggtgggttgatctcgctgacaatatcggcaaatcaacgggcgcgttttgttcaagtccgtacggagcgcatcctttcattttgatgacatggacggatacgatgcgggatgcctttacccttgcccatgaactcggtcatgccggccatttttactttgccaaccgagagcagcgcatcatgaatgtcagaccgtctctatatttcattgaagcgccttctacaatgaacgaaatgcttctcgctcagcatttgttttccaaaacaaatgatccgaaaatgaagcgctgggtcatcaaccagctgatgggcacgtattaccacaatttcgtcacccatctgcttgagggggaatatcagcggagagtctatgagctcgccgaacaggggcacgcacttaccgcttccgtactgtctgagcaaactagcgccgtgctctccgaattctggggcagcggagttaaggttgatgaaggagcaagcttaacatggatgcgtcagccacactattacatggggttatacccttacacctattctgccgggctgacagcatcgacgatcgtctcgcaacagatcaaagaagaaggccgccctgccgtagacagatggctgaacgttttaaaagcaggcggtaccatgaagccgctggacttgttgaaacacgccggtgtcgacatgtcgacagaccagccgatccgccgggctgtgacgtatgtcggaacattggttgacgagcttgaaaaactgtacgataaaaaagaagaccggcctgattaacgggcggtcctctcttatacggttacagactgccgagcattggatttcctttcattccgatccataagtctgattgctctaataaatgggcggtgcgcagcagccaatgttcctttcctttcggagccgtcacttgaacacccagcggcaaaccttcatttgtcagatggaccgggacgctcattgcaggctgtccggttaagttggcaagctgtgtgaatggtgtatatgtcaagcttttcaaaaacatttgataaatcagcgactgctgctcgattttttccagctcacttactttcaggagcgcttcggcttctttttcggtatgggtgagctcgccgacctttggagcggggtaagccgttgccggggtcacatacagatcataggtctcatgaaacgccgccatttgtgcagctgctcgatcccaggaagcaaggcttgctgtaaattcggctgccgacacttttttgcctgcttcattcagcacccatgtgacaatttcaacgtcctgaacagtgatcgctcttccaagcgttttttccattccaagaatcatcgcggaaatttcaccgctgttcattaagtagtagttctccattaaccggattccgtcaacgccgttcgtctgctcttcgacatggtgtccctgcgcttccagccatcgaacggtgcggcggacggcttgtttggcttcatcgctgacaggcgttccgacgggtgattctacagagaatgcgattttcaaagggcgctccagcccttttttcatatcctcttcatactgacctggaaataaaggcgtttgaaaagcggcttcaggctgaatggtttgcagaatatccaggagcgccgcgctgtccctgaccgtacgggacagcacaaaatcgatcgatgccccctgccactgccgtccggcgcccggtcctacaggcgttctgccccgggtcggtttcagaccgaatagtccggtaaaggaagccggtatccggatggagcctcccccgtcgcttgcccctgcaagtggaacgattccggccgccaccgcagccgcagaaccgccgcttgaacccccgggtgaataatcagtgttccaaggatttcgcgacggcccatacaattcaggctcagaaatattttttaatccgtattcgggtgtattcgtctgtccgagaaataaaaaaccggcgccgcgcaatttcgcgacgaaattcgaatcgcgctttggtttataagatgaaagcagcttggcgccggctgtgagaggctcccctttcaacgcttgggaaatgtcctttaaaagaatcggcaccccggcaaacggctggtgtctgatgtcaagctgtttggattcaattttgacctgctcttttcttgtccgaatgactgcattcagttctggattgacttcttcaagacgggaaaaagcagcgtcgattaattcgttgaccgttacttccccatgtttgataagcttagataaagcaaccgcgtcatgctttacatagtcagatatattcatatcagtacctcactttactgttcgcttgtgcttactattgtgcatgagccttttggggatttcaacgatttctgtttagatcaaaaggagatgagtgaaatgaacattcggagattgcatccagaacatgagccgccgcttgatttgctgttgacggcagacccttccgaaaaactggttaacgattacctcgaacggggacagtgctatacagccgaaatcgaccgccggattgccggtgtctatgtgctgctgccgacgaggcctgaaacggcagagctcgtcaatatcgccgtcaaagaagatctgcagggaaaaggaatcggcagacaattggttatgcatgcgattgaaacagcgaaagctcaaggatttaagacgattgaaatcggaaccgggaattcaagcatcggtcagctggcgctctatcaaaaatgcggatttagaatcaccggcatcgaccggaactttttcctgagacattacgagaagccgatatacgaaaacggcatgcgctgcatcgatatgatccgcttatcgctcgacctgtaaacgactgttagttttgggattttgtcatcttttcagcgtgaaacgcaatccttgcagtctagaacagccaatgtttgtaattcctaggcaccggcgcgcaggcctgacaacgaatgcgagggtttgtcgacacgctgaagccgccgggctccccggcggcttctcgtcaatattcatcaaaacaggacttgatcgttttcggatcatccgtttaggccagcgcctttaaaaggttgaattcttcctttatttttttcagcagctcttcattgatgagcacatcatatgcggtgaatgccatagattttgcgccgagcatcaagccttcgaacccccggctgctcatggccgcttcacgaaactcgggtgtgtggcacgcatacggctcatcgcaaatttgcacataaggatgaatggaaggcgcgatctggctgacattccccatatcaaccgaacctcctccgtccgctttttcatgaatcgaatccggatcgacgcccaactcgatcatgttttgtgtaaaagcgtctgacagcgtttcatttgttttcaaatcatcgtaagacagctcataaaaagagctctcaagccgggctccggtcgcaagtgcggccgcttttgcacaatttttcactttatcgagcagttcattgacataagcgcgttccgttcctctgacgtaaaactgggcaaccgcgtaatccggcacaacattcgccgctttccctccctccggaataatcccgtgaatccgggcatcagggagaatgtgctgtctgagcgcattaatgccgttgaatgtctgaatgacggcatcgagcgcattgattccttcgtgaggtgctcccgccgcatgcgaagcctttccgaagaattcgaattggatcgcatccatcgccagcgatgtcccgcttttttcatgcctgcaatacggatgaaccatcatagcggcgtccaagtgatcaaaaaccccttgttcggccatggttacttttccgcctttcgtctcctccgcaggagttccgtaaacatacacttttcctccgcacgatgcaatcactttgctgacgccgattgcggcgccgaccgccatcgtgccgatcaaattgtgcccgcaggcatggccaaggtcaggcaatgcatcatattcagccataaatccaatggaaggaccgggacggccgctgtcaaactcggccgtaaacgccgtcgcaaggccgcatgtgcctaattccacctgaaaaccgtgttttttcagctcctcggacagaatctttgaagctttgaattcttcgtgccccagttcaggatgattgcctatatactggctgatatgcagcagctcttcacgaatattttcgatctctttctcaatttgttttttcataacggttctcccttctcgattaccgaaagttttttccagggttgacaaagtaaagctcatatcctcaaaatgtttaaatatataattatctgaatattaatacattataaaggagacgaacggaatgagcaatggcaccccacagaaaacaaaactgcacttcccacatacttatgctttgatttttttcattatcattttagctgcactggcttcatacttcattccatcaggagaatttaagcgggttgaagaagacggccaaacggttatcgtacaagggagctacaagcagactgacgcaggtccggtcggttttttcgagatgtttaaagccataccggagggcatgattcaatcggcggatattattttttatatctttttaataggcggagcttttggcatcatccatcagaccggtatgattcgcgccggtgtccatgtgctcgtgcagcgcttgaataaacgcggcttcctcctgatccccgtcaccatgttcgtcttttccatcggaggcgcaacgatcggtttgtctgaagagacgattatttttattccgatcggaatcgctgttgcgagagcgcttggctatgattcaatgacagggctggcgatgatttctctaggcgcggctgcagggttcaccggcggcatgttgaatccgttcacagtcggaattgcacagacaattgcggaagtcccggtgtttagcgccttcggttatagactggccgtttatgccgccatgctcggtttctccattttttatgtcatgcgttatgctcaacaagtcaaagcgcacccgaataccggtttgatgtatggaagcgaaacagagataaatgaagagacagccgcaggacacgctgatctttccttcaccggaagacacggcctcgtcctgctgattacagcattgggcttcggcatcaatatgttcggtgtttttcaatggggatggtttttaagcgagctgtcggccggctttctcatcatcggctttgccgccggtcttgcgggaggacgcggcatcaacaacaccttccattcgtttgtcgacggcatgaaacaggttgtatacggagcgctgatcgtcggcttcgcccgtgccatcgtcatcgtattggaaaacggacatattatcgatacgatcatcaacagccttgcttcagcaatcagctcgcttccgaatgaaatcagcgccatcggcatgttcgccgtacaaatcgcgattaacacgtttattccatccggaagcggacaggcagccacaacgatgccgcttatggcgcctctggccgatttattgggattcgaacgtcagattgccgtattcgcttatcaatacggagatgggatcaccaactcaatcatcccgacctccggcgtattgctggcttcactgtcaatcgcaggcgtcccttatgaacgctgggtcaagtttgtctggaagctgatcgcaggctggattatcatcggcgccgctgcgattgttatcgctatgataattggtattaagtaaacatccggtccacaatatgcagccggtgcccccggctgcattcccccatatatgcctccatctctctgactatagaaaagccttacaccatcaaaaccgccgtttctaagacaattgatctactaaattttaagctcaggttaaggaaacccgaaaacgggactttttattcactatggcccaaatttgaaattcaccaacataagggcgtctcctaaacaaaatacttatatttttaacctgatctgaccaggatctaaagtaaaaaatggataaacctcaattaaatgcaccgaagtgcatgtcattagttttagtctcttcttactatccaaagtttgaaaacatgcctaatcctgcaaatcattgaccaaaattagtatttaacacctatttattaatgattcttcaaaccttaaaatgagtgatgttgtttctgtttttttaaagaaactaaggaaaaaggaagaattataatcaaattttcactgttagataaatgaaatgaccgggacttgagtaagatttgtcccgatgaagggcctttatgccctggccgcctcattcttttcatttacataacattgaaaaaaataataaaaaaggagacagaccatgcgaagtaaaaagttttttctgatgatgcttttgatgattgtagcagtcgtgtcaacagcctgcggaggcagcaaaagcgcgagcggagagaaagaagatacgaaaaaagcagataatgcagaagttaaaatcctaagctccgaatatacgcttcctgatgattcatcaacaaacctgcacgaaaatgaacttatactaaagatcaatgtttccgtgaaaaatacagggaaagaaccattaatggttgataaaagccaattcagcctttacgaaggcgactcaaaaatgtcggacgtcagcgtatatgatgaaagaaacaaaaggcttcgctcttcgacgctgaattctgacaaagaagtcgacggaaatatctattacatcgttgaaaaaggcaaaaagtttcagcttgaatacacacctgacatgtacggtgaaaataaagccgatcctgtcaaattcgagatcgacggcggcagcgacgaattactgaaaacggccaaaaaacttgaagatccggcaaaagctttgctagcttacacagacgtaacgattttcggcaaagacaataataactttgataaactggtcgacgaaaacaaacgtgaagtcgttaccgattaccttgaaggcgctcaaaaatctatcgttcgctctttaggatattatgatgaagaagatgtggataaaaagaaattgaataaactgatcagcgccatccaaaacgcctatcaagaaaaatctcaagtcaaagcagttacaaaatcaatttcaggcgatgaagcaactgttgaggcaaccgttacgccaatcgataatacagatgtccaaaagaaagtgaagaaaagactggaagactatgtgaaagacagcggcaaagacttcatgtccagagatgaattgatcaatcctgcgattgacatcatgagtgaagaaatcaaaaaagcagaggcgacttcaagtgagaaaaccgttgaagtcaaacttgaaaaatcaaaaaatgacaaatggaaaattgatgctgataattacaagaccgaacaatacttctcaagcttccttaaaagcaacaactaaaaaaagcaccctagaggtgctttttttcaattacaataaaacaagtgctgtccggcagcggcacacgccggccgagccggtctgtcagctcgattttagggtaaaggtgttcttcatatccttcctgcacatagtgttcgaacaccagaatgttcgcacgttcccctaattctttctcgatacagcggcggaattcagacggcgtaaaatagccgaactgctcctgcacttcatgcggataggcttcttctccccatgtatatgtatagaggaattccattgcatcattcacaaacagtacagccgcgtccttctcagcctcaagcatttgcacctttctccctttaaaatcatggacataccgcttcaagaaatccattccatccgggtctttaaaccgtatccgccgcgtttcctctttgttttcggtcatgattccgtccctgatgatgattctgcctcccggcttcagaatgtcaaaggagctttttaacgcttgggcaatgacgagatgattaaattttttcccttcatacggaatgtatgaaaacaattcgtgcaatatcgatgagaatacgatggtgtcgacgctttcctgctcaaagtactcaggcaggtccaatgcatcagcctgtttcacatgccagggcttatgttcgcgcacttttcttttttggagctcctcaatgacattgacggaaaggtcgattccgatgacctctgcttctggatgctggtctgtcagcaaatcaagcatcacgccgcctccggctccgatgtcgagcattctttctccaacggcataatcggcaatcttctttttataatcttcagcaccgttcatatcagacagataagccgcttcattttgcagccggtcaaacgaatccttgcgaaactcaaaaaaatcataaagcagcacgatcgcccgttcatataaaggcgatttctccgcttcctggcaaaattcaatcagcttcagtcctgcctgcgaaaatgaaaacgtgacgccgacaatctcagaagcctgatcaaacggctgaacagcaagcgaaacgtgttcatttacaggcacctcgccgtaaagcaaatcgctgatcgacatctcttttaagcacgcttcgataattcgttttttataaacatttatatgcctcacaccctggtaatcacggtacatgtccttcatcagcggctcaaagctgatgtgcttgactgataaagggttgacagaacgaagcacgagcagaaagattttgacaaactcttcaaaactgaatgatgacaaggcggattccacataccataaatcaatccgctgaaagaagcgtctcagcgtatcttccgccgaatgctccctcaaaaaccgctcgtaccggctgctgtcttcaccggaatcgagcgcttgtccccgcagttttctgatcctttccgcaaacggccagtctttatttctttctcctgtgcagatttggccgattacccggttcacgtctcgttctatcgaatcccaaagcgccggcgataccgcttcaatgatacatttgttcagcacgtatagaacccgcctgatatcgatgtgctgaagttcagatgtttcaatccaatcgataagaggagtgaattggcgataccttgtttccccgcggatatactgtccgacgagtccatgcgtcacaatcaaaatatggatgagttcttcaatatcctgccgttccggcatgtacgcctgtcttcgatcagcataaatctgcgccgacccgatattatggatcgcaagctgaaaacctttttcacgccattcctttcttttatgaggctggccgcacttagccgcttcactccatatgagaacctcttcaatgatttctttttccagctcaggaatgtcagctttctccaaaatagagagcgtctgttcaacataaagaaaaacgggattctgaggcatgttctctagcgaagaaatccgctccaggttgatattttgctcttcagttaaaacgagatacttcagccattcggcatcccgcaaaacatgataatccccgttttttactttttcaatggcttctaacgattgtaaacgcctcatacgttcttccctcttttttctatttcgatatgatttatcataaggtaaatggtttcatatagaaataggataataggcttataatcgctataatgtttgaccgcagtcagccgttaagatttggcctgtaactgtttcttgttcgagcagcgcacaaatgagcaaggcgatatcttccggttccgctatccgctcaagcgggagcttttggctgagccgcttcattttctcttcattcccctcccaccatctcgttgataccgcgcccggtgccacacagctgactctaatatcaggagcaagcgcatgcgccaatgatttcgtcagaccgtggaccgccgcttttgatacggcatagggtaacgaagagcctgaaccggtaagcccggcgatgctgccgacatttacgatggcgccttgtttatttcgcttcataaaaggtgccgccgctctcgcacaattaaacatccctttgacatttaccgcatacagttcatcccagacttcttcagaagccccttccaagtcatcaagctcgatatgcctggtgatgcttgcattgttgacgagcagatcgacggtaccgaactcgcccaccgcccgatcaaacatgtcttgaacttcactgatcttagaaacatcggctttcaccgcgagcgcgcggccgccttgactttcaatcattccaaccgtctcttcagcctccgctttggaacgcgaatagttgacaacaaccgctgcccctcggtttgccaaagagagcgataccgctctgccgatccctgtgccgcctcctgtgacaagggctgttttatttttcatttccatttttcaacgctccctttcaactgatgcaagctgtgctgttccattcccaaacgaccagttctctttcacgttttcggctgcaatgatcatgacgtcctcttggcggatgccggcgtttttttgcaaacgctctgcaatgcgttggtacagagccagctttttttcgatcggtctctctttcattgtgatgtgaatataaatcaaatccttcgtccgtttgatgttcatatagctaggatcgaaaaagaactcttcctcatcgtgctgggtgatgacctgaaaataatcgtcttccggaacatcgatcgcctccgtcatcgcctggtgaactgatctgctgatccggcgaagctcttcctttgatcttccttttaaaagatccatcctgacaaatggcatatattcattcctcctttgtattgtttaatagtgtataacggttatatcattttgtataattgaatcatttgaaggtttcattcaattttattgaacttgaggtgatgggatggatttcaaaacgttaaagacgtttcataaaatcgtggcttgcggaagctttaaccgcgcggctgaagaactgaattatgcgcagtccacggtcacaatgcaaatcaaaaagctcgaggaagacctcggcattcgtttgctcgagagggggaaaacattccgtctgactgaagccggcaggcttttttttgaagaaagcagacatattgtcaaggatatagatcaccttcaacatcatatggccgacttattgcttggcgaagggggaaatatccgccttggagcggtcgaaccgatcgcgagctgtgaattgccccagattttggggagatttttagcggattatccgaagatccgggtttccgttgatatcgccaactcgtcggcattgggggaacggctggttcaaggaagcctggatcttgccgtctgttcgactccggcaatgggaacagatctttattttgaaccgctttatgctgaagaactcgtagtgctgctccctgagggacaccccgccggaaacaatgaacgcattcatctgaaagatattagggagcaccgcctgctgattacggccaacaattgcacctaccggaagaaagtcgaaatcgcgtttcaagagctgccggggagccaaatgaacacgatggagatcggaagcatgacagctttgaaaaactatgttgccgcaggactcggcgttgccctgattccgaaaagcatcgtttcccctcctcctcccggaacgattgtccggtttatcgacgatgacccgatcagcgtaaccttcggcatcctttgcaaaaccgcggcgtttccgctgaaacaggctgatgcaaagctgtaccaatatttgaaacaggaacttggagaaccgtaaaaaaccttcccggccgatgccggaaggtttttgattatgagaatgacgagatatggaaatgatgatctggtctcagagggggatggtcacttgtacctgtccgcctcctgcttcgctgtttttaatcgccaaatcgccttgatgaagcttaacaacacgaagtgcaaaggtaagtcccatcccgtaatgaccattcgatgtccgggctttatcttccatatagaaaagctcggcagctttctgcaggccgtcttgagaaaacccttttccgctgtcagtgattgtgaaaatcaattgatcagccgtacacacagcttcaaaatcgattctcccgccttctggtgtgtgatctgcggcgttcgtcatgatgttcatcaacgctcggtgaagcagctgtttgtcaaacactgctttttttccttcaaggttctgctccttcaacacaatgtcaatcgatttgttccctatatatgcttcagtctcatggagaacactttcgactagcgttttcacagcgccttctctgtactcggtatgtaatgcttcctcagtttttgagagatggattaattggtcaatgtactgttcgattttttgccccgcgtcaaggatgtatctgatatattccgactgctcttgattttgcggagataagctcagcaactccgcatttcctttgatgatggtcactggaattttaatatcatgagccaatgcgccgatctgttcttttttcgttttctctaaatgccactgcgcccgtagggaggcttggagggcattcctcatgtccatcagggaactgattacatgatcaaattccttaatattcgagaactccggagtaaaatttaaattctgttttttaatttgctcggcaatggtgtttaaagtttgaaaatgttcttttaatctgtttgcaaatcgggttgtcaccgtaaaaacgaccgtaattaaaagaagaacgatgatgcatatgcttgtcagctcatagttcgggagaaaccgtctcagcagtggagaccgaaactcagcgcgcaaaggatactccaatacacaatactcgtctttgcgttcgataatcatatagcctttttgactaaagctgacataaggcctgctctctatctttttccgtacaatcgaaagattcgtctctttcatgtttcccgctgtcttttgtttcgactttttgtccagtatggcgtacagcattgtatccggtatcatgtcttccgttatctgttcagccgattgaagcctgggcttaagcttttcagcttcgatttcattgtagttggcaggataaaacagccctgcattcattcctatcatattgaccaaaacatataaagccgtgatcgcgatcaggctgaagctcaaagtgagcatatatttgatcagttctctgcgcagtgtcttttttttgcggattattcccatctgtatcctacgccccataccgttttgatcggatctctattgtgttctttgcattttttccgaatcgtgcggataaattcggttatcgtcgaatataaagcattgccttccagcccgtatacatgatcataaatttcttctcttgtaaaggttcgtcctttatgctgagccaatagctcacatattttaaattcattttttgttaaattcagcttttgatcatgaataaatacttctttgctgtcaaagtgaaataaaaaaccggaaatcacccgtttagtctcgtatttctctcttctttcccttctcaggtgtgcatttactcttgcactgagctcaagaacgccgaagggttttgaaatatagtcgtctcccccagtcaggaggcctttaacgatggcctcttcctccgtcttagcggtgagaaacaggatcggacaatctaccagcggccggattttctcgcataattcaaacccgtccatccccggcatcatcacatcaagcaaaattaaatcataccctgaaaacacgtcgagagattcggtgttaacttgacttagcgtatgaacttgatgctgatcgcggcgcaaaatattttgtatgagtacaagaatatctttctcatcatctactgccaaaattttcgccacttgctgaccacccttttttcattattcaaaagcttttcttccttcccagcggataaaccaaatgatgcttagagcgaatacagctattatagcaaacaccatgatgaaagccccctgcttgatttccccatctagaacagagcggagagacggatcaatttggacaaatcggtcaatccccttataccctgtcagcctgattccccatgcccagggattatatttccaaatgacatcgcccaatcccgtgttcatcagcgctgtcatcaaaaggcctgccccgcctgctaaaatcgaagcccccattccgaatgtacagctgatcaaaaagtatatgaaataaagtgtgacacttccggctgccagccatgccccagcctctaaaaaaagggagcttggcaggttcggcacatgaaaaagagctctgagccccaataagtagagtccaatagccaagaataccgcaaaaatgttcatgatcagaagcagcgtgactttgcttaaataagccgttaatttgggagccgtgccgcccaacagcacttgaaaacggcctgcctgctcctctaaggaagccgtcattccgcacacaattccaatcagaagcggcaatgcaatcgcaatggcttcaaaatacgtgcgatataattgatatggatcgggctgtctgttatagaaataaagcagaaaaacacccgcacagataaccggaacactcaagtgaagccaaataaaagacgtacgctttgttttttgaaaatcagccgccaggcatctgaaaaataacaacaaattaaaccgcctcccgttttatcgatttgcgatcaacggcaggagaaaaagaccgcctagtcagacgcgccaaaatagcaaataacagaacagatagaacaacagccggaggaacgactgcccagctcgttaaaggatcgccattctcaagaggcacaccgtttggatggatgccaattgtcgggcacatgaccctgatcggccagctccaaggattcagccaccaaaaagggcttgatgccgacatgatgcccaatatgatagtgcccagcatattgaacaaaacggcagatataaacccgtactttcgcgctatccataaacagacggggatctcccatagtgtcgtgagccaaagcagcagattcgcggcaatgactgtcaaatgaatgctcgaaaattgaggaatgacaaactgcatcccaaccatgaatcctaaaaaaacagcttgagatgctaaagaatagagcgcaatgacgcttatttttgcataccaaatctgatgcaaatctacaggagaagaaaaaatgccgttataattcgacgctttcttttctttctggtgtgattgtgcacaaagcaaggcgatcatgaccggcattaagatgacagaccaccaattatacgtacctgctacaaaaaatcccggattcattaaaaaggcgaagcaaatattaatcaaaggcacaatgaagatcatttttctcgaaaatgttcttttaaacttcaggttttccgcttttacataatatccgatcacttttctccgccctctttctcccgcgttgatttgacaacatccataaaaagccgctcaagatcgtctcccttattgattttcccctgatatccgagataccctccgctgataatcccgatatggtctgcgatctgctcgacttccgataaaatgtggcttgataaaatgaccgtcatcccctgttcgggaaatgacctgatgagttccctcaactcttgtataccgatcggatcaagaccgttagtaggctcatcaagtatgagtagtttagggcgatttaaaagagcgatggcgatccccagcctctgcctcatccccatagaaaactgccccgcctttttctttccggtatgatgcatatcaacagttttaagcacctctgttattctcgcatctggaaggcccaataatgcggcatgcaccttggcattctcgtaggctgttaaattatcatacagaggcggggattctattaaagaaccgatgtcttttaatacggaccttttccattgccgcccctcaaacaaaatatccccggcagttgggtttaagattccggttaaaagttttaaagtcgttgattttcctgctccattcggtccaagcaatccgtaaatactgttcttttcaactgacaatgagacgtctgagaccgcttgcgatcttccgaactttttttgaagatgccttgtttccagtagaattgtactcatcataatctctccttgtttgatctgatcgtaccgatatcttaaaatatctttctcaagatttaatcagaatcaaacgcaaaaaaccttccggttccccggaaggtttagcagttgtgtgagcttttttaagatggcataagctcaagatgatggtcaagttcatcctgcaggacggcttcaatatctttaaaacgattcgatacggtcgaagcgctgacgccgtatttttttgcaagctttgcttgggatatcgatttttccgatttggagatcgtattgataaaatactccaaagcagctgcaaaggcttctgtttttttgatgaccggtgcttttttggcacaatacgatttccaaaggccgaccgcccaggacacaaatggttcagaatgtccttcgtcaagcatacctttctcaaaaacgagcgctgtttctttttccatctcattggcccattcgatgtcttcggacacttgttcagacggtgtactctcttcctgccggcaaagatgcattaacacatgatggaaatcctctctcatcagctgctctttcgtcccgccttcttctgtaaaacggttcaaagcctcgcttagcctgtctttgagagcatccgccatttttgcaggatagatggtgaattgcaagaagaactcggtatggcttccgatcttgatcggaaagccgagcacgtactcgcctacaaaaggcccttcccgtttcacattcatcctcacggtcagctcttcattcgttacagcatcctcaaagcgaatgccgccatctgttatatgtttcacacgcagcaacgcaggggagaggtctttccacgattgaacggcttcctttgtctgcgatctgagaatcgaagatccttttttctgtaaaaagtcttcaaaaatcgtcaatcctccatctgccagcgggcgggcaaatactccccacacgcccaggttaaaaacacatatcttttgcgcagactgatccaggtctgacagaaaagaatactgattgagaaattgatcgattgtgtctttatgttccgtaaaagcgaattccatgacgtctttctggatttgtttcaattcttgcaccgcgacagccggaaacgctccctctgctttgccgcagcattttttatatttcagcccgctgccgcaggggcaaggcatatttctttttacttttcccacgtttaaacctccgtatcttatactacaacttatttattttatcaaaactttcaggagggggaaatccgataatgaaaatcagtatgatttagctgaaaagtaaaattttataaaagaggccaaaaggtttatttaaaaatagaaaaaaagactataaaatggttaatgttgtgtttttatcattcatttataatagagaggatgttatacatattgcaatacgctcgtttttgggttagagcgggtgcatggttgatcgattgcgtattggcggtcgggttacacttttcatccgcatggatattcggcgacggatctcatgaagttgctgcagccgccctgctggtatacgttttgtatccgcttctgatgccgctgacaaagctccagggcacgattggaaaagcaatttttagaattcgtatcgtttctgatgatacgggccgacggattaagctttggcaggctttcgtgcgctacatcgtctcatgggtgcatatctttttcggtctgctgtatttaaccgtcgttttttcaggaacgaaacaagcggtccacgatttcgcggctagaacatatgtcatgaaaacgtccgacactgagtaaaccacctttattcatttaaacagaaataaaaagggatatgaatccctttctctatttccggtattccagcagactaaccgtcaggtgcactagcaagcaccccagccactgaacgggagttaaacgttcgtttaaaaacaaaacacctccgaagatggtgaggacggggccgatcatggaaatgacggcccctcgttccgctcctatccgcttcatgccttccagcatgaataaaaaaggaatgaccgtcgtcaccgccgcaatgatcataaaaaaaccatacattgcgggaggataagaaagcacgattcccggttgttctctcagcgagcgaagcagcgcataaccggccatcgcaagacttgctgccgacattccataggcattcattcgaatccctccgatttgacggacaagtcctcccgccacaacaagataggccgcataagcgacagcggacaataggatcaaaaaagcccctgacaggttcgcttccaatgcttgcacatcccatccgccgacagccaaaaacagcccggcattcacaagcaagatggcagcaaacgttttacccgagaccatttttttatttacaaaggcggttatgatcaatacgaacatggggtagctcatcacaatcatccgttcaacggttgcagaaacaccgtgaaggccgataaaatcaagcaatggcgatagaaaaaaacaaagcaatccggccgcacaagctttaaaaatctccgctttttcaggcttagccggaagctttgagcgatacacaataaaaatcagccaaaacagcggcgccgcaaataattgccggtacaacagcaccgcttccggctgtgcaccttgttcataagcccatttgacaaaaatggattttgaagcaaaacacatcgtcccaaagaccataaaaacgaccccggccgcttttcgaacaccgtgttgaatatggccgctctgctcagctgtactcttctctgctcgactcaactctaaacacccgtcctttttattcgttgagatgtttttttataaaatggagcaatgtgctgccctgcgccgtcaaaatcacgccttttcccgaacattttggacaaggctccggctcttctcttccgcttccattgcaatttggacatgtcgtttccaaatcgtccgttgcaatcaccatttacgatcacacctccgtttccgtttagtattatgcggccactccggccagccttcctccatggccaccacctccttaaaaatgcaaaaaacccccgtcacaaaaggacgagggtctcgcggtaccacctttattaatcgcataaacgattcgctcggaacatacggaaaggggacagtcagccctttcgatacgcttctcttgataacggagagaacatcccggctccgcctactgcccgtttcagcgaagcgattcagaagcccattcggcatcaggagggcatcggttcacaccagccaccgactctcttaagcccatgctctgacacgtacttgctcttcttcaatatcgtttagccgtacatgatttgtaaaaaatatattactctgaaaattagcgggtgtcaaacagcgtcaaattcttgtttttctacgaacctttaatatacacacgatcaacaggcacaaaacaaagagattgaatgctgctatccaataaaaatatcccgggatgcctatgataagaatcggaagtcccgagctgagaaatacactggcaagtgcagcatataacacttttagtaagccattatatttttccgcttcagattcacggtctgtataaatcacatttgtttgaacttgactcggatcagccgcaaagtaatgccaatttaaaaactgtgtcacatgcttccagcctgcatcttcgtaaatatgaatatattcttcttgatcaaggtttgatgttgtcttatagtcgagccgatatactgtattgcttggttttgtcttttcaaatgtatagataaataaaaagaatgactttaacatccacccttgtttggccatttcattcagccagtcctcttccttccggtcttgccaggcaagaaaaaaacggaatttacgctttctttttttactcattgcttgtatctccctctttttgaaaaatagattgactgatcgccaccaatttagacagacgtttaaattcgagttcaacaaccgcccatccttcattcgttaaaatatactgctttctccgattatcgccggtttcgccttcctttttaatcaacccctgcttttcgagtttgcttaatgcaccataaagagtgccaggccctagtttgacctctccctcgctcatgctctcaaccctttgcataatgccgtagccgtgtaatggttgagttaatgacaataatatgtaatatgtagcctgcgtaagcggtagatagttttccgccgtttttttcatcacttttcgcacctcattattaagtatggcttttttcatttatatatctcatgagcagtacaacacctattagattgaaaatgatgctgcccccaagaaccagcccccacaatacaccgtttatccctgataaaaccgctagatttaataaaagaattccgctcaaaacaaataaaatcccggtaaggtatgtattcaaatcatttgcctcctcattttgtatcgtcttacgatatatcgactaacgatataatagcatattagacgattcgacacaaatcaaacacagcaatcagcctgcaaatcaaataagtcagcacaggctattgcccaaaaggaatatctcacattaaaatctaaaaaaaccgcctaaaaggtcatttcacaaccttatcaggcggtttccagcgattattcctgatttctgtcagcaaacaccgtcatggcgtcgcacatgaacttcgccaagccggcgccgtattgatcgatgtttttcgtaaagcgcttgtcagccacatacatttgtcctagacctttgaaagcttccagcgaatagctgtggccggtgttattgttcagaaagtcgtaccattcctttatagccgcctgtgcttcctctgagtcgggggcgccttctctgagagcggcgatttttctgtaaatggcgtcatattgctgttccattttttttcgttcaccttcggacatcgattcgatataggccttcgatctgtcgacggcttcatctccccagcgttcccgcgcttcttcctcatacgggttttgactgaaatcaaaacccgcgaatttttcctcgtttgtcatgttgatttctcctttcgcaaattggatcgttttatcgattgtcgcaatcatttggtcaagccggctccttttctccagcagcgctttgcggtggagctgaagcgcctcattcttgtcaaatgaagggttctcaagaatgcttttaatcttttttaaagggaagtcaagctctctgaaaaataagatttgctgcagcttttccagatcgtcatctgaatacagccgatatccggcttcggttgtctccgacggagctaataacccgatttcatcataatgatgcagtgtgcgcacactgatgccgactaaatcggccacttcctttactttcattttcatccatctgacctcccttcgatattgactataaagtatcccgcaacgtgagggtcaatgcgaaatttgaaatttttttcgtgcaatttttatgcaaacaaaaaacccggcaaaatcactttgccaggtcttttaaaaattgttcagcaggacttctctaagaaacggatcatccagccactcgttcagctggcccgcggagaatccttttgatacattgagatcgataagcgttccgccggcatagccgaaagaagccgacctgtccggaatggtgtccggccctttcgccaggacattcttcagcttcttcagaatgttttgaaaactcttctccaagtcgcttttcgggtctttggctgattcaatcactcgggtgagcttctcatttccgccttcaagctctcctctttcatccaaactgacatcagccaaagacagcccggcgaccgttttcaaaaactcattcacatgccatttttcgtaagcctgtttatccagcggcgttccgttttgttcaccgatcagttctgcgtggcccaacagacgcgcaccgaaccgtttatcgctgtcgtttaaaacagcttcgatacgggttcttttttgttcgtcttcgatgccttcaactgtaatccggttatgtccgtcaacatgcaatgtcagatgttcgctttcggaaagggaaattccgctctcccgcagcgccccttcgatctggctgttcaaacgctgcctgtccacataaagattatagatctcaaattgaacgccgttcatttgtgaccgtaatgacggtgcatttttttgggctgattcagcctgtttgctgatggagagagtgtctgtttggctggcgggcatccttttggagcctttagtctttgccggcacattcgcggcggccggcttcatcagctgctcggaataaagcgaaagttttaccctgtctctaatattcatgggagctcctttcatgccaattacattctattactttttatatcggccgggatttggatctgtttaccagccgtatgttgaatcgtattgataattgatcttcagctgcggcgatctccaagttgaactgctccaagcgagcgaatagtatctcacattccatgtcgttttgacgggaagcgcaagttcaggctttagatccggaaacagtgtgccgcctgaaaccgatgtgtgccaaacgccttcttccttgttcaggacttctctgtaggtgtgtccgagacttggatatatcgttccctcggcagaaacgcttttcacagtcgctccttcgggaatggccgaggcattggcaagattgacggcggcaaccggagaaacgactccctgtcccgggcttgagatggatgacggagacaaattcgccgtataagcaccgctcttcattctgtcgataaattcaagtctgtaaaatccccagccgtcatatgaaccgtctttagacatgacgaccgcaatgtatcggcctgtctcgggaacatccaagcggatgatttcattttggtttcccattctttcagaagatcctactgcgggataaccgtaagcatctttaaataaatatagatcataatctgtatttgccgggatgttctttaggtgaatggcaagctgttctccctttgtcgcgtaaaatttgtaataatctttatcgctttcgctgtgaatcgtcgccgaaatcgtcttgtatttccacaaccctacatcgtaagcctcagcgaaagaattgttgggttcatactcatcttcgtaaacattcgccgaagccgaaaatgctggaatcgccatcaaaaacaaactgaacacgaacagaaacaaactttttttcatttgtccttgcctcctgtttattcatcaccataaaggaactcccttcctaatatcggtaataaaacaggaagtttaatgaatttttataaaataatggtatttccccagatttaatcatctttcggctctgccacactgcccaaaaagagaatcattccggatgcttcatcaacgatcgcaaaataaaacgggtggtctgcagtcatggtcacttcagggacgggggctgattcgatgatttcaaccgccgttgccgcggatgcttcagtgcccgcttcatccactttgataaatgttttatgtctgactttattaatttgagcggcgccatgcccggtaaacatatttgaaaaattcgcgctgctaaacacgtttttcattccaaggcgtttaagcggttcatttaacatgtagtctgtttgaaatgagaagcgcggcagcttgagctccacctgtttcatcgtccagcccttttgcaaggcgcgccattgatcatgcgtcatgccagtcagaagctgttctagatttgccgcttttttcggcagaaaaacggctagtgacaggccttcgtcttgaaatggcagcttgacggcttgaaaatgttcgttttccagataaggaaagcggtttgtctgcgtcatcatggggtgtttttttgcggagccgtccgctgaataaaatggctgttccgctgtcatgtgaggatcaaatgggtgcttccagctttctttaaaatagacggcattgatgatgtaggcaatcgtattcgacgagactttatcaacgatctgatcgatgcggtctttcgttttctttttgacccagctgttgatttcctctgttgcccgattaggatcaatttgaagctgataggcgtcgccaaggcctttgatcgcgtcttgaaagctttctttcagctcccttttggtccatatcgaattagctgatgaaaattcaccgtgaggcagcgtttcaagagaacgattaacagattttgatatcccgttgatcgatgccatatccgcctggctgagatgtaaagtgctgagcagttcctttctgctgtctcccgcggcaccgtttgccgtcatcaaaagtgcctgctgaatactgtaaggcgagaggaagatgtttttccggctcccttcttcttttatcatgtcttgaaacaaggcgagcgcaaatcgctgttcagcttcagaaaacgaggcttccgttttttgcgctgatctgccgcgcgggggatcagcctccttcagtgcaccgcatccggccagcaataaaagaccggcaataaccaccattgcactccatttcgatttcaattgtcaacacctcctaatgttgtagtgggtttagcactggaaaacgttacaaaaaacggcagctgatgcaaggaatcagcaaaaaaagcttatccaatgctggataagctttcggtcaatcattgcgctcactgccctttgactgccagttcacgcagatcttttttgacgattttgccgagcctgtttttcggaaggctgtcgataaagacgatttcaggaattttatagtcggacaggcgctctttgcaatacgcgataatgtcctccttcttgaggccggcgctttcatttttcaccacatacgccctcggaacctcgccgtacatttcatccgggacgccgatgacggcagattcaactactccgggcacttgatcgatgatttcttccacttggtccggataaatgttgtcgcctccgtagacaatgacgtctttataccggccggtaatatataaaaatccgtcttcatcgagtttgccggagtcccccatatagaaccagccgtctttcagcaccttttgcgtggcggaaggattttggtaatacccttcaaaaacatacgggcttttgacgacgacttctccgacttctcccgtcggcagctcttcatgtgtatcagggtcttcgatttttatgctgacttgcggaatcggcttgccggctgaagtgactttatcccagcccatgtcaggccgccatacgctgaccgtccatgcttctgtgctgccgtacccctgcaccatcatgattccatggtcattgtactccttaatcagccgcgccggcaccttggtgccgccggaaacaagcattttcacagatgacaggtcgaatggatgtcttttcatttcctccagcatgtaggtgtagacggaaggaaacgccatcatcatatgaatgcgtttcttctcgatctcctgcaggatttcaaacggttcgggatcccataagaaataaagggcaattccttcaaaagccgcctgaaaaacatggttgagcgagctcatatgatagagcgggtggctcgctaaaaagcgcgtgcctttcagctgcttcgatttcacgttcacctctgtcaagtatgcggccagactgccgtggttgaccatgcagcctttcgggtttcccgtcgtgcccgaggtgaacagcattaaagccaaatcatgctctgtcacctgctcagcttccaccttcagcggcctgtttttaaataagctctcaaactgttcagtcgtgttcattcccgcacccgcttcaatcatcaggcagaactgaagctgttcgcggagcggcgttagtatatcggcaaattccaagtcataaaacatcaccttcggccggcagttgttcaagattccttttaattcatacgatgtcagctgccagcttaacggcacgactgtcgctccgattttaagagacgccagcaaaatgacgggaaaatgatgattatttttacataaaaccgcgatgtggtctcctttttgaacaccctcctccagcagataatgagccagctggttcacccgttggtgatacgctttgaacgtaaacgttcgatctcctccggacaatgcttccaacccatctgacgtttccatatgatgattgattaattgctgaagtgtactcaaaattttcatctccaaattttcattgtttctcacaaaacctggtgagattatgtgacgcacaaattcattctaaaacaaaatatatccattgtaaaactatttcataatagaattattatctttatgaactgataacaaaaggaattaaaccgctcattttaaaattcacaaaatcgttttttgcggagcattcgcttatgataaaatagacctatgtttgtttggtcagtatgaaattgctgatctactacacgatgtcggaaatgaggaaaccttcatgaatcaccatcggattgaagcgaatctattggaccatgctttcacgaaatatttgcggtcttcaaagaaattagacgaagaaacgattccgaaaagtatcacgagcggcaaagggtttattttgcgtatcatttacagacacggaacatgtacgataaaggaaattttacaggaggtcgcgctgtctccatcagcaacgacaacagctctgaaccatttggagaaagagggtcttgtgatcagatcgagaaataacgatgaccggcgcaccgtctggatcgaactgtcgcaagaaggaacgaggatcgccgcacaaatggtggaaaaccgccaggccttgatcgacaagctcttcggcaaattgtcagaggaagaaaaaaaggctttttttgctgtgattgaaaaagtgatgatgtaaaacgggccgtcgatcgaaatcgacagcctttttttattgtgtgacgccaagcgcgtccagcgccattttcaagtgctcttcttgtttcgtttgaagggcaaacatgccgatttcgatgccgtaggcggcctgcatttctttaatatgctctttcatccgcggccagacgcgtcctccttcttcttcgtaataagagatgagccgtgcggtttcggcttctcctaaaatcgtctggtataacagaaagtctttagccgggtcggcgatttttgcttctgtccaatccaacagcccagttatgctctgatgctggtcaatcaaaatatgcggagggtgcaagtcgccgtggataaacaccgtatgttcaggccaatacgagtcgtcagacagccacttttgccatctttcccagagctcggcgctaaccccgagctcacttttgatccgctccatatgctctgcttttgtctgcctgacgtcatccggattcatcacatgcatgcccgcttcttctgcgtccttatgatcgatgccgtgcaatagcgcgagcgttttcgccaatgacctggtaaacgcttcagccggaggctcatgctccatgttccatacgtaattcttgatgtccatgtcaatgactgcggcaggcacacccggaagctccggatatgcaatcagttcgggagtatgaatgcgccaatccggcacagccgcgggaagacggttttgcagcagcttcagcactttcccttcatacactgccctttcaatcacatcgtcgcgccgcggttttctcaacacccaactcttacctgcttcatcttctgcaaaaacgacttgaaaatccatgccggactcgttgatttccgcatgctttcgtttcagccgaaggccgtgtttttccgcaagttttaatgtatgttcaatttgctcatttacagttgtcatatacgattttcccctttgctgaaggttttgaataaaaaaagcgcaggtcgtctgcctgtgctggaaagtaaacggaaaaaagatatggctaataaactgaaggcaagcttcagaaatgctatttttaaaggcaaaaagaggcgctggaatccgcgcctctccctctattactgcataagggctccctaaaaacaggcagactaatcccgattaccctgcacacaggcagagtctttgttcacgatttagttagacaaagttcaatcggaatctgatgtatgccatttgggaaatccctccgttcttaaaagttagccttattttaacaggtgttgggaagacccgcaacgaaaaattcaattattaagaaaatcaccctgataaaggaaactcgttcctggcttttaaaactaatcattcacacccgttcggcgctttaattctcttagccaagccgtatccccggttccatagctcttcttttgccctgtatcccgcaatgacccgttgctgtagtcaatagacaagatgaaatccggaacagaatcatattcggcttccgcaagcctgttcagctctgctccataatgagcgattgcgagatgagccgttttcttgaggacgggatccttctccagctcttctttatacacttctaataaatcacggccggaaggtgttacatatcggccatcaaccacttccaaatctttcaggtgataccctgtcacctcatatatctcgcgaaccgtctgatatttttggtgcgcttctttggaatattgtgccgaatcgctgctcaagcttttcatgatatgcagaaataactgtttgctgttttctcctgattgcaatatttgttcaatttgatggatgagttgctcatcatctgttccgcttacctttacttgataatcaatcggtgtaatcgtaaaggtgagcgccgcatccgctggaatggcaatatgatattgatccagcagcgcttgaagctgtttgttgacttggctgcgctgatatactttctcattctccgtctctacttccccattaaaagtcacatttcgaaacgcggcatcctgcatattatagctttgcgcctttcctttgaacagccactcagtttcattgtcatatgcagcctgtctttctgctgccgacaagtcatttctgaaataaggggaattggggtttttgtatttatccttaatgtagcctaaagggtcgggtttcgttttgttcattgcatttattttgctgtatttttcatctaagatttttttcctgatgtcactttctgacacataggggttttgggcattaatcttcgtttctttccctgtatctgtgacagttcgatcatttgctgcttcgtatgcccgcctgaaagctccggcatgattcacaatactgtcctttgagtagttcagcttactcaaactttctttcgatgctctccctgcttgactgctggccttcttcgcaacggcagtgatatcggaagagacattttttaaagttgtatcagccgcatttcttttcaatatattctggaccatcagctgtgtacggatgtattgactattgagacgcattgggcacctcccctcaattctttctatactccctatatcggcttgattatgtttatattaaccttattaaacagtaatttacatgaaaacctatttagcagtctcatctatctggatgaaaaatcaaaaggcatcccaaaaaaacggatgccttttcttatttctcatcttccctgtcaattttattccgtatccgctcaatcacctcatgcagaccctcaggtttataaaactcgaccggagagctgcccttttcaaacgaaatcgtttcggcttcaatgagcgccacatagcggccgtttactttggcgaggtggatcgagtctccgaactcggccagcaatcctttaatctcggtttctcccagcttcattttcagctctgcctcaggcatgtgctcaacgatttgggctgaggcttcgatgacttggtgggtgtcaagacgttcctgaatctcccgcttttcgctcgcttcccagatttcgaggtcgtgttcaaactgctggagttcttcgcttttgtcttcaaatgcttcgtacacgtgctcctgcaccatgttcatcacttgtgacttcatgatttccggcatcgactcgccgtactcgacgaattttaagaagtcttcaaagtagcgggcgtgcgaggcctggtggattttcacttcgctttcctctgtcatgccctcttcaggcatgtgcgggtactgaatcgatttcatgtttttcgtcgtaatcgccatttcgaccttgcgaatcagcgacgattcatcggcgatcgtagcgaccttcggttcaaagtcgcacttcatgacaaagacaaatgtatcatcgaagtatttgcgcggtacggctgtcgccactaaaaacacgcctcccctgacggcgctcgtgtcgaggtatgtgcggacgaactgttcgctcagttcattgaattcttcctttgtctccgccagttttgttttgtgaaacagattgtagttcggattagaatcaagctcatgccccggctctgtgatgaagcggccgattttcgtcggcacctgctccgatttcggatggcgttcggctttccgcttgacgatttttttcaattccccgtctaagaaatccttcagctcgctgttttcaaattcctctgtatccagcgtctgaaaatgtttatattgcttgttggcctgctcatccttgccgtcgacctggatgacgtaaaaggagatgtagcgaatttcaaattccatgacatgttcacccgttttccttgttgtttcagttcttcaagtataggtaaatgccggtattccgtcaatttgcaccttcaagatatacggagatcttataatacgtcttcctggtcaatttttcgaatcgaccaaaacgcaatggcaattccgactagagccaatgaaatcggaatgtaaatgatggaagcaagtgaaaattcatcgctttgctgaccgagcaacgtggtcaagatacaggatgtcacaatggtggcaggaactgattgtttgcgcatcccaaagtataatggaataaaactcagtcctgtagaggaagcagcataaatgagcatactgccaatctcattccctacgtcatgcatcgtcaatttttccgggctgaattgatagacatcattgagctgcgagaaaataaatgcaagaatcagttcggacacgatcattgtcaaaaaggtcaatccgccagtaagcagcagttttgctgccattagtttttttctgctgactggatatgtaaacatgaccgtgatggttctgtttttatactctccgatgaccagtttggcaatcagcacgccggcaaagacaataaacacagacctcacgaaaattcctataactagcagcatggatgcggcatcagccatcgacatttttgcttgagggaggtttttttcctctgatccgatcaggcacaataaaccgagaatacatagatttgcaattactgcacctttgtaataccaccctaattttgtttttttaaactccaatttaattaaattcagcattgaacttcaactccgttaaaaaacatctattttttcaatacgccttacagccaaaaaggaaaaaaacagaccgactgcggcaagagataaaggtatatacacaattgaagaaatagaaaagccagggcctgtggaactgatcggcatgatgattacaacagatgagatgatcgttgccgcagtggagtactttctcattccaaaaaagatgggtactaaactcgttcctgcggcgccaaaagcaaaaacgatcattttcagagcctgctgagacgcgatagaagctgttaattcgccggggatgatcccatagattgagttcagcagaaaaaaaccaactgcaacgcatgcgtttgatatcaatatcgtaacgaaggtcagcccgcctgcgatcagcagtttagcagccagcagtttctttcgattgatcggatacgtgaacatcaccagtattgtcttgtttttaaactctgaaatcactaattttgagatcagcacagcgccgaatacgataaaaacggctctaacaaaagtgccgatcaatagaaaagtttcatcaatcgtttggaacgtctccttgccttctgtgcaggtcaccatccacagaaaaccaaaaatgatgaaattggcaaagacggctccgcgtatataccatcccagcttcagctttttcatttcaattctcatcaaattcagcaaatttctccgcctccttatgcgttgaccgcattgccgttgattaagctgaggaagtagtcctcaagcgaagtatgctttttattcatggattcaatttctacatcattcaaaatcagagctttagaaatggctgtttgagaagcttcggcatcataaattcggatcgttttatcatttagtattttaaaattagcaatctgcagctcatgttcaagcacaaagcaagcatgcaattggttcggcgtcacgagttcaatgtactctgtgttccgtccccttacgctttccatcgatacttcttcaacaagcctgccgtcccgaatcactccgattgtatctgcaatttgctctacttcgttcaagatgtggcttgagatgagcaatgtcatgccatactctttgctcaatacttgaaataagtttctgatttctttaattccgatgggatcaaggccattaatcggctcatccaagatgagcaagtagggtttggtgagaatggcccgcgcgattccaagacgctgcttcataccgagggaaaatgttttgacaggtttgctgtcgatattttttaaattcaccatgtccagcacttcctgaatcttggctttattgtgatatcccatatactcacaatgcagatttaaattttctttggctgtcagattttcataaaaaatcgggtattcgatcatgctgcctattttcccgagaatctcgtatgatcgatttgtcagcttatgcccaaggatattgatttcgccgcttgtcggtttcacgaggctcgtcagcatcttcatgatggtcgtttttccggctccgttcgggccgagaaaaccgtatatttctccctttcgtatatgcatgcttacatttgaaacaacttcttgacctttgaatgtcttggtaagcccgcttgtttgtacgatgtaagtcaactctgtttctcctttcctgtctctgctatgtgtctattgtagcgatggacgctgtcttttttatttcttgtttcttaagaaattcttacgtttgctaataggtcattcgttttaacgtaatggaaaacactgtccgttcatgcggcttgctttggagagagatgttccctcccattttctcaatgagcctttttgtaattgttaaaccgagcccgcttccctggaacgctttatttctcgattcctcaagggtatacagtctttcaaacacccgctgctgatcgtactcactaattcctttcccacggtcccataccgtaatgacaatccacgtctcatcatatgtaagggacaatccgatcagctttccgtctgcaccatattgaatcgcatttgataaaaggttttgcaaaatccggtcaagcgcttcttcatttccatgtgcataaaccggggtatccgggatgtcgatgacagctttaaaaccttttgcctgaacggcatcatagtgttggagaatgttttttctgcatatttcgttgatatgtattttagtgagcagtatttgcttatcttccgattccagcttggccaagtcaaagaaagaattcatcagctgaatgatttcgcctgttttttgataaagcttctccagcagtctttcacgctcctcttccgccatgtctgaatcattttggatcgcctcgatatacccgagcacgacggtcagcggagttttcagatcatgggacatattggtcagcattcgtttcattgactgctccgtttttgcaaaacgggctgttatgtgctgatgctcctcaacaaacaggttaatttgcacgagcagagcccgcagtactttatcagccgttcctaataaaatttgatcagcctcatgctcatttagcatcacactgagcttttccgtgatgtacttcaagtttcgatcccgttgtcttttcattttatattgaacgatattgagagacgccaaaattatcagaatgccaatccataacattgtcatcctaaaactctgctaatttatagccgatgccccaaagcgttttaatatattgcggggaggaaggatcatcctctatcttttctctcaagcgcctcatatgaacgttaataatattttgatcgccaaaataatcatcattccaaaccgaacgatagatttgttcttttgtaaacacttttttagggtttgtcacaaacaaagtcagcattttccattccgtcgatgtcagctgaagcggttcaccatttttttgtacggatacattttctatatcaaccgtaagctcgtgaacacgtaatattttttgatttgccggttcactgacggaatattgcgttgcccgccgaatggcggcttttattcttgcggtcagttcgatcatcgaaaacggcttggcaatataatcatccgcaccaaagcccagccccagcgctttatcgacatccccgtcttttgcggaaatcattaaaaccggaactttgctctgttcacggatcattttcagaaaatccattccattcagcttaggaagcatgatgtcgagcagaatcgcatcataattgccttgctgaaacaagcgaacgccctcttctccgtcaaaagcaagcacgacctcaaatccttcttttgttaaataatgatcgaccatttcactgatcgaatgatcatcttcaataagcaatatgtgctgcatcttgttcacccatccttttcaacataaaaacacacgtgcaattacactcattgtaattgaaaaacgtgtgttttttacaaaaattattcatatttctagttgaaacctattgtatctccggatcttttggccgataccaatctactttcccactagcacggatcaagtcacaggcgctgggttgaataaacacaagtcattggagagtccccaatgttccgcccatgttttccttccgcttgcgacgtcaagtatcgtccggaagatttcccagccgacttcctctattgaagcttcgcctgtagcgatccttccggcattgacgtcgatcaagtcgtgccaatcttctgataatgactgccgggtcgccactttcaaaaccggagccatttcaaggccgtacggcgttccccttccggttgtaaatacctgcaaatgcatgccagaagccaattgcagggtgccgcatacaaaatcgcttgcaggtgtcgccgcaaaaatgagtcctttctgtacagccctttcaccgggcgcaagtacggcactgatcgggctgcttcccgacttcgcgatcgacccgagcgatttctcgaccacgtttgccagtccgccttttttgtttcccggcgacggattggcgcttcggtctgattcgcctctttccagatagcggtcataccaagccatttcccgaatcagggcgcggccgacttcttcattgacagcgcgcggtgttaggagatgaacggcatcgcggacttcggtgacttccgaaaataaaaccgtggcccctgcccggacaagtaagtcggccgcatatccggacgcagggtttgcggtcactcctgaaaaggcgtcgctgcctccgcactgtaggccgatcaccaggtctgaagcgggacatgtcatccgcttccgttcattcagcctttttaagcgctcttcggccatttccataatcgattgtatcatttgctgaaacccttgccgttcctgcagtgaaagaatgttttcagcgtctccttccggctctatcttcgtcggaaggagcttctcgcagccgagtccgatcaccatcgcttcaccgccgaaattagggtgcctggcgatattttgaatcgttcggatcgggattttggcttccggcgcattaatcgccacgccgcagccgtactgatgatttaatgcagcgacaccgtcaacgttcggatattttgggagcagttcctctttaattcgtttcactgcgtaatcgagaacgcctgcgacgcattgaacgcttgtcataatgccaagcacgtttctcgtgccgacgctcccgtcttcattccggtatccttcaaatgtatacccctcaagaaggggagcgggttttggaactttgttggcgatgggcagttcatcgagcggcggagcttccggaagcatgatatgcgactcggaaatccacccgcctttttcgatcggtttgacggcatagccgataatttcgccgtagcgaataacggcaccgccctgtgtgatgtctgttaaagccactttatgcccttgaggaatccgctcttgcagcttaagcccgcaaggaaacaccgtcccttgcggcagtccgccggcattggcgatgattgcggcattgtctttttcgttcaccttaatgtacaacggggtttcagtttgattgacaagcataaggattgatcaactccccttttcgatcagcgcctttccgcggcccttctcccgccgcggcacatgttagaaagcgctgtcaaacaacttaatgattgtttttttcatcacgaagaccattcagtattttgtcacgtacaaattttaaatgctcatacatatggtgataggcttgatatgggtccctttgttgaagggctttcaaaatattcgtatgatattcgacagtccggtccctttccctatatggaatctggctgtcgattttggcgtgtgtgatcaagagcgattgaatcatcccttcaagcaccgggttgttcgcgctcaaagcgataatccggtgaaattccttatccgcttctccataatgattatccgtgctgtttgctataatatcgatcgtttcctgaagcctttcgagctgactgtcattgatcttttctgcggcgatcgtgacaagcccgagctccagcgccatcctcgcttcaataatggccggcaaattatcgactgccaaagccagcatgacagaaaacggctgaatgccgattttatcattaaaatatgtgccgtcccgggtttttcttttgataattccgagcgtttcgagcgatattaaagcttcgcggagaacgggtctgctgacattcagcttttccatgagctcaatctccgtcggcagtttgtcccccggtttcaactggccgcttgataataaatggacgattcgttcaacaacctgttttgccaaagtcttgcgattgactgattcgacctgcaatgtttccatatcttcttccacgactgtgggccccctttcagttgttcatattgtaagacaaaatatcgcgtatgacaatgtcggctaggggcctctcaaaccgctgtttccgcaattatcgaacaagacaaggacgtttagggtcgaaacgccaattttcaatcaaaaactgcatggcagcggcatcattgcgctcgcctgctgtcattttctcatatagttcatttgctttttccacccgttccatgtcgatttcaatgccgagcccaggctgatcaggaacttggacatatccgtcagcaattgaaaaaggctgttttgtgagacgctgtccatcctgccatatccaatgcgtatcaatcgccgtgatatcgcccggagctgctgcggcaacgtgggtgaacatggccagtgagacgtcaaaatggttattggagtgagagccccatatcagcccccattcatggcacatttgagcaacgcggacggatccctgcatcgtccaaaaatgcggatctgccagcggtatatcaacggcgtgcagctgtatcgcatgccccatttgccgccagtctgtcgcaatcatattcgtcgctgtcggaatgcctgtcgcacggcggaattcggccatgatttcccggcctgagtatccggcttccgctccgcaagggtcttccgcgtaggcaagtacatcccgctttcccttacaaagcgcaatcgcttcctccaatgaccacgccccattcgggtcaagggtgattctcgccttaggaaaccgcttcgctaaagcggatgccgcctcgatttcttcttctccggaaaggacgccgccttttaatttaaaatcgtgaaatccgtatcgttctcgggctgcctccgcaagacggacgatcgcctcgggagtcaacgcttcttcacggcggagatggaaccagtcgtcatttgcctcttgttcactgatatagggaagcgtcgtgcgctttcggtccccgatgtaaaacaaatagccgagcatcttcactttatcccgctgctggccttcccccaagagcgccgccacagggacgccgagaaattttccgagcaaatcgagcaaagctgcttccaatgcggtcacagcgtgtatcgtcgtccgctggtcaaaggtctgcaccccgcgtcctccggcatccctgtctttaaaccggcgcctgacggactgcaaaatcgattgaacagcgccgagcggctgatcgatgacgagcggcttcgcctgctccagcgtctggcggatccgctcgccgcccggcacttcgccgacgccgagagcgcctgatgaatcctttaaaatcacgatattccgtgtgaaaaaggggccgtgagctccgctcaaattcaaaagcatgctgtcccgccctgccacgggtataacccgcatgtcggcaatagacggtgtttgcgatgctttctcctcttttacatgctgatggatgtttgtattcatatcgatttagcctccctcttattaaagcgcttacatttcacatggataaagtggtgtccgcagggtctttctctttctgcagttcgatgcgcttgatcggcccgacgagaaacaaatagcttaataccgcggcaatcgcgttggctccgacaaacacaagcgctccgttaaatgagcctgtcgcattcacgatatatccgatgatgatgggcgtcgtgatggacgcaatgtttccaaaggtgttgaagatgccgccgctcaagccggcacactcctttggcgaggtatctgacacaaccgcccagcccagcgcgccgaatccttttccgaaaaaggcaagcgacatgatggaaacgaccagccaggacgaatctgcatagttgcatatgatcattgagcaggacatcagcatgccgaggatgatcggcgtttttctggcaaccgttatggagcagccctttttcaaaaggaagtctgacacgaacccgcccagcaatcctcctaaaaatccgcagattgcaggaagcgatgcgacaaaacccgcttcaaggatcgacatgccgcgcgcctgaacaagatagaccggaaaccatgtcagaaagaaataggtcagcgttgtgatgcagtattgagcgatatacaccccgagcagcatccggcttcttaaaagctgcttaatataaggccattgcgactccttttcttttttttccgcgttctttccctcatccatcgagacaagcgcgccgccttcttcgatgtacgccagttcggcggcgtttattctcgggtgttttttcggttcgtaaatcgttttcagccaaatgaacgacatcgcgatccccagtgcacccataatgacaaaaaccgtatgccagctgaaagagtgggcgagccaccccatcagcggtgaaaaaatgacgagtgcgaagtactgcgccgagttgaagatcgccgaagctgttccgcgttcagaacttggaaaccaggaagccaccacccggccgttgccggggaaggacggggcttctgacagaccgacgagaaatctgagcgcaaataaaaggattacggccgttcccgcggcgaaaaagccaagcgcaccctgcaaaagggtaaacaatgaccaaaagaagatgctggcggcgatgacgattttcgacccaaaacggtcgagcagccagcctccggggatttggccgacaacatacgcccagccaaatgcggaaaagacataccccatcgccaccgaactcagcccaagctcatgctgcacagaatcgccgacgatcgaaagtgtcgcacggtcggcataattaatggatgtgacgagaaacagcatagacacgacaaaccagcggacagaacttcttttccccgcggtatcgggggaggctgcacgattttttttcatagcatcttctcctttattcatttgtaccgaaacgactgacttacggtttgacaaatacggttttcacggctgtaaaaaattctttggctgcctccccctgttcccgtgaatgcgagctcgattgtttaacgcctccgaatggcgcctgcagttcgacaccggcgctttcggcgttgacgcgaatgagccccgcttcgatttcatctgtgaatgacagcatccgcctaatgttttgcgtaaaaatggaggcgctcaggccaaatttgacgtcatttgccgtctccaacgcttcctcaagtgtatccgccttgattaaagcgatgaccgggccgaaaatttcttcttgggcaatcgtcatgccggaagtgacgttgtcaaaaatggccggcctgatataatagccgttttcgtattttccatctgccagcctctcaccgccgaaaatgaggtccgcgccttcttgctttccttttgcaatataggacaggcagttgtcaagctgctgtttgttcgcaatcggccccatccagacatcttcttttaagctgtcgccgattgtaatctcttttgtctgttgaagcagcttttctttaaaacggtcataaacaccatttaagacgatgacgcggcttgtcgctgtacacttttggcctgtcgacctgaacgctccgctgatgaccgcttcaaccgcaatatcaaggtcggcgtcatccgctacgatcaccgggtttttgccgcccatctcaagctggtacttcgcccctctttcaaacgccgtccggccgatgatttttcctgtttgattcgatcctgtgaacgtaattccgttcacatccgggtgctcggcaagcctttggccggccgatgatcccggtcctgtcaccgcattgaccacgcctgagggaatccctgcttcttcaaagcacgatataaccttaaggcaggtgactgcggtttccgtagccggcttaatgacaaccgtatttccataaataagagcaggcgccattttccaaatcgggatggcaacagggaaattccacggtgagatgacgccgacgacgccgagcggcaccctgtctgtgtacataaaagcggatgaatcggtcgacggaatcacatcacctgttttccgcagcccctctccggcatagtatctgagaatcgcgattccccgcgctgtttcgccttttgcttcaggcagtgttttgcccatttcacgcgtcgcacattcggcaatttcatcgaggcgctgttccatgatgtcagcggccttgtaaaggaattgaccgcgctccgcgcccgacagctttctccacgcctttttggcctgcttggccgcttcaactgcccggtctacatcctcaatcgaagatttttgcacaagcccgacgatatcccgtgtatctgccggattcaagctctgttccatcccgcccgattcagccttcacccagcggccgttgataaagttgaaatacgttttactttcagctgcaacagacatcttcaagttcctcctttttgtttatagggcagcggtcgttttcggataacgcgccatcgcgtttttcagaatgttttcgagctgccggcaatgttctttttccaccggaacgatcggcggtctcgccgtgtttttcacatgaagccccatgatttccatgccggctttgatcaaggacacggcatagcctttccgaagtttgcggatctcgttgatcggtatgatgacttgctcataaatctctttgacaagccggtcattgccgtttaataatgcctcgtaaaacattctggaaatatggggaatataattggatatcgccgaagaatatgatgtaaagccaatcggagcataggccggcatcgtgacttcagccatcggcattccgttgagccagcccagcctgtcacctatcgtatatgacaaactgatattcaacgccatatcccctatgccgtctttaagtccgacaagctgctcgagatcggtcagccgctgaatctgttcaagcgtcaaaaccgcattgtctcgctgataaatgattgcgtttaaatccgtgctttcaatgattgttttcgtgtattgatagaggccttcctgctctccgtgtatcaagtacggcgggagaatcagatagccgtcggcccctttttcctcggaaatccgcgcccattccaaagcggtgcttaagttgccgcccactcctgtgtaaacaggcaccttcccgtccgcagccgaaacggcgatttcgaccatttgctcatattcctttgtgctgagagattgaaactctcctgagccgcaagcgataaaaaccgcctcaagcccttcatccaataaaaagcggatgttttcgtaaagtgcttcttcctccagttttccttccctgttgaagggcgccaccggaaaacccaatatgccttccggcgccttccgtaattgactcatctccgtcatccccctgtcgttcattttctgagaaagcgttgtcattctgttgaaatacgatgtctctgttttagtaaatccctccattcatctttttgtttaattgtaagacaaataaacaaattgtcaatatcattattttctgattttttcatttcaggcaaaaaaaaaagagactgaagacacagtccgtcttcagccttgggcctcagccccttgttgtgcggcggtttttttccggtagataaatgccgataaagagatgctcaattcgtataatacaaggagcgggacgatcaccagcacatctgagatgaaatcgggcggcgtgatcacaaccgatacgacaatcagcgcaaaataagaaatttttctcattttactgagcttggccggatttaaaatcccgaggctcgttaaaaacatcacgatgaggggcatttcaaacaaaaacccgaatggcagtgtgaggttcatcataaagcgaaaataatgctccgccgtaaacatcgtttgaaaatggccggcggacaggccgatcaaaaactgaagaacgagcggaaagagtacaaaataaccgaatacaatccccaaaataaaaaaaatgaacagccccggaatataaaataatgccgtcctccgttcgtggtcggtcagcgcaggcgccacaaaccgccatgtctgaaaagcagccaccggtatggtggctgcgatcgccagcacccccgcaatcatcatataaacccaaagaatatcccccggccccagtacagcaagcttttcatcaaggtctctgatcagccagtcatagatgtcctgaacaaacaagaagccggtgatgagaaacagaataaacgtaagaagcgttttaatgattcgctggcgcagctcttcaagatgggcaatcaaatgtgtttccctttttttcaccttcgccttcctccccttcgcatgttaaacagaaaaaagaacagacgggttcacccgcccgctctattgatcatcgtgccgatggatcgctttgcttcttcgcatcagacccctgtccgatctcattgtcatcggcagagactaaagactttgtcgcgcttttgaattcggtcagcgtttttccaaaagcccggccgatttccgggagctttgaaggcccgaaaatgatcagcgcaattaccagaaccaagatgagaccaggaataccgatatttgaaagcatttgctgtcatcctttcattgattactgggttacttttttctccttttgcttcacttgcttctgatgggcccttgtatgtgcgaggaaacggtcttcttctacttcgtttgacttcttcacgcctccaggcacaatgttggaagcggtccgtttcagccctgtgtagtctttatgataaacataggaagctcttgtcgaaaccgccgcacccggctctgtcacatacgggacgacgcggtaatctgtccgccattcttccggggtgaccgtacagcgcacatagccgcggtaatcattgaaaaactttatatgaggattgttcgataaaatcttatccgtatccgctcttttatcagcgccgtttcctcccgatgtaatcgacgtcccgacgaactccacgccaaagatgtccgatttcggattgtcaaaatcaacgagcagattatttgcccagctggcatgcacatcaccggtaaggacgacgatgttgttcagtttttgagatttgatgaagtcgatcacccgcttgcgctgagcgggatatccgtcccacgaatccatgctgtaaatcggcgccgcgcttgtcccaaagttccactgcgcaaagaaaatctgctgtgcgataatgttccagtgcgcctcggagcgactcagattgtcaaacagccaagcctcctgctccgctccaagcagcgtccgcttcggatcattcgattcatcagaaggcggcttattgccatcgccgttagcctggtcatcgcgatactgacgggtatccagcacgctaatgtcagctaaattgccgtaggaaaaattccggtacaattgcatatcaggaccgttcggcaaggattggcggcggagcggcatatgctcgtaataagcttggtatgcggcggcgcgccgtttaataaacgcttcaactgactggcctttttccgggatgacattcgcatagttgttctccacttcatggtcgtcccatgtgacaacccacgggaaggcggcatgcgcagctttcaggtttgcatctgaacggtattgggcatgacggtttcggtaatcgagcagtgacatgatttcaggaccgctgtgtgttctgacatttcctgttttcgaaacatattcattcggaccgtactcataaatatagtcgccgagatgaaaaacaagatcgagcttttcctttgccatatgctgataggcggtataatagccgtgttcgtactgctggcatgaagcaaaagcgaatgtgaatttagcaacatctgccccgggcgccggaagcgtctttgtcttgccgacaggactcagctggttgccgcatttaaagcggtaatagtatacatgattcggtttcagcccggatacctcggcatgtaccgaatgtgcaaggtgaggtgttgctttttcggttccccgtttgacgacacggcggaagcgttcgtcttctgcgagctcccatttcacggatacagcttcatttggcatcccgcccccgtttagcggatcgggcgccagccttgtccacaatacgacgctgtcagaaagcggatctcccgatgcaacgccaagtgtaaacggatattcggagaacctcggtgctgcattgacttccattgcccccatcgattgcgcgatcgcaagtccgagcgaaagcccggctattttgccggccccttgaataaagcggcggcggtcaaacgtattgtccttgaggctttcctcgctcagttttttcatccattcctccagcggtccttcatgtgtcattcgtattacccctctctatacaaatgattgatcgggttctattataggcagaatttattaacgttctgtaaagtattgcaaataggagaagaaacgcgatacatggtcgatcaagtcactccgccagtatatatgtcgaattttgtcgcaaatcaatccaatcgcctatgatttcgacaaaaacccggtcgtttcccgcagaccgattctcccgtttttcttcacattatctttaaagagagaaaacaaaaaagcccacaccattgccagacaatgatatgagcttgatcaccaagtgactttatgtaagacgatgttttaacaaaatgtattgcaatgtttttttatttgctttccatgtttaaggctttcactaccacttttgttgcctctgcaataagcttatcatcatacttggcatcctttttatcccggctggataatactgcgagaactacaggatctccttttggcggccaaatgatggcaatgtcgttccgggttccatatgatcccgctccagttttatcagccacttcccagccttccggcacaccggcgcggattaaggcgtccccggtggtatttcgtttcatccaatcgattaaaagctcgcgtttttcacttggaagtttatcttcaagagcaaaagcttgaaggcttgtcgcaagtgctcttgctgtactggtatcctgagtttctcccggattcacttcatttaactccggttcgaatcgttcaggatttgtaacctcatcaccaatcttcctcagttcctttttcaaactttcaggtccgccaatttgtttaagaatgaggttctgtgccgtattgtcactatatcgaagcgaagcatccgcaagctctttaagcgtcattcccgtatcaacatgcttttccgtaatcgggttgtagtttacaagatcatcacgtgtatatgttattctctggttcagatcttctattgatttctgttgtaaaagcacgcctacggttaaagccttaatcgtcgatgcaaaagcgaagcgctcatccggccgatacgttaccgttcggtttgtaccagtatctaatgcaaagatcccgagttttgcatcaaattgctcctcgagttttgcaaaatcatctttcatctccgtcttttcatctttctcggcagaatgtgaggcattcgagtgattgctgccgcatcctgcaagtgcgacgcaagagaaaagcaacacagctgcaacttttttcagttttaaagtactgaaccataatttcatcaaaatcgtctccctccgtatgaatatttgattgatcgtgactagctgtgctaatcaagaggcatttcaactaaggctggcaacattcgtgaaaaccccttgcacctgaaaacacggacggccaactcaaacatcaaatcttacaagtgtagtcttttgaagtattacatacgtaagttttaaatgcaaccgtttttttggaaggaataaaaaacgaaaaggtcatgaggggaatggccatgaatgccgacagaatgatgacctcgtttaaaccggtgacaaatgaatggctgggggcatcatcttcgagtgatggaataaaaaaaggaaaaaaacattttatgtcactccagttaaattgacttcttaacatggcaaacctataatgaaagtattacatttgtaagtataggatgatggaaatgaaaaaaatacctcaaatctctgatgcggaattagaagtgatgaaagtcatctggaagcattcttcgatcaataccaatgaggtgattaaagagttgtccaaaaccagtacatggagccctaaaaccatccaaaccatgctgctgcgcctcattaaaaaaggagcattaaaccaccataaagaaggccgggttttcgtttatacgccaaatatagacgaaaatgattatatagaagtgaaaagtcacagttttttaaaccggttttacaatggcactcttaattcgatggtattaaactttttggagaatgatcagctgtcaggtgaagaaattaatgagttgtatcaaatactagaagaacataagaacagaaagaaggaatgaaatgagcagttctttctttattccctttttggttagtcaaattctattgtctctgtttttttctctcatcatactcataaaaaaactgctgaaggctcaaatcactgtaggcacccactatcatcttagcgtgatttctcttttggcattgatcgctccttttctcccctttcattatctaaaaagcaatcattttgactggattctgaatttaggaggagctagctcaacgctatctcacacccgttccacagataagacggcggaagcaattggccaacatgcaaactgggtgcaggatttttcgatgtcgattgaacaatcgtccttcaaaatgatagattcagcctttttcgcagtctggatattgggcattgctgttatgcttatcgctactctttatagcaatcgaaaaatcggcaaaataaaaaagagcctgcaaatggttaacaacaaagagctattaaccctttttcgtacatgtaaagaggaaatacgctttcatcaaaaagtgattttaggctgttccccattgataaaatcccccataacatttggggttgtccgtccatatattatcttgccaaaggatatttcaatgttttctgccgacgagatgaaatgtgttttgcttcatgaactgtaccattgtaaacgaaaagatatgctcatcaactattttctttgcctgtccaaaatcgtctattggtttaatcctctcgtgtggtatttatcaaaggaagcaaaaacagagatggagatttcttgcgactttgccgtattaaaaacgcttgataaaaaattgcatctcaaatatggcgaggtgattttaaaattcacttcacttaagcaaagaacgtcatctttggtagccgcttctgaattcagcagctcatacaaacatatcaaaaggcggattgtcacagttgtcaacttcaaggcggcatcacctttgctaaaggtgaaaagcgccttagtgttcgcccttgttcttgggatcattctagccggcactccttctgtatctatattggctatgcaaagagatacgcactttttatctggtgcaaatgtagaatacgaagatgacagcaccttttttgatggcttctcaggaggttttgtcctgtttgattctaacaggaaaaagtatacaatatacaataggaaagaaagcaccgccagattcgcacctgcttctacatacaaggtgttcagcgcattgctcgcactggaatccgggatcatcacgaagaacaattctcaaatgacgtgggacggaactcaatatccgtataaagaatggaatcaagaccaggatttattctctgcgatgagcagctccgcaacatggtattttcaaaaactggaccggcaaattggagaggatcatttgcgtcgctatctcaaatctatccattatggaaatgaggatttctcaggtccggcgaattattggctggatggctctcttcaaatttcccctcttgaacaggttaatatgttaaaaaagttttatgataacgaatttgattttaaacagtctaatattcaaactgtgaaagattcgatacgtttagaagaatcaaatggcagaattctatccggtaaaaccgggacttcagttatcaacggagaacttcatgccggctggtttgtcggatatgtagaaactgccgaaaatacttttttctttgctgttcatattcaaggtgaaaaacgggctgccggaagcactgctgccgagattgcactttccatcttggataaaaaagggatttatccatccgcttcccgataacagttttgcattttatcctatgaacatgaataatgcgcagatagatgaatggttctttcaccttcctaaataaaacggaacttggaggcaagatcatggaaaccctttatacagaaagattgactttgagaaagatggaattggaggatgcagatgtcctctgtcaatactggtcagacccggaagtcacaaaatatatgaatatcgcgccttttacagacgtctcacaagcgcgggacatgatccaaatgatcaatgatttaagccttgaagggcaggcaaaccgcttttcgattattgcaaaggaaacgggtgaagtcatcgggacatgcggctttaatatgatcgaccaggaaaacggcagagctgaaatcggctatgacttaggaagaaatcattggggaaaaggctttgcttccgaagctgtcaaaaaactgatcgactacggctttacaagcttgaacctcaaccgaatcgaagcgaaggtagagcccgaaaacacgccttcaatcaaacttctcaactcgttatcctttcaaaaggaaggactgttaagagaatacgagaaagcaaaaggaagactgattgacgtatacatgttttcactgctgaaaagagaatacgctgggtaaccggcatgcagaagagcttcctcactttagaggaagctctttttaacctctttttccagcgctttcactcaaccgcttggcttccaaaaagaaaacctgaatgaattttttcgtgttgacgcgggcggagggcaagacggcggcagagtctttctgcagttctttcatttttttgctgatgacggtaaagtcaaaaaaccgggacgcatagctttcaaaccgcggatttgaaaagtctgttaaaccgagtgatgcaaaatggtttagcgaatggctgaccgcccgccgtatccgctgctcagacgctttaacctccctgttgatctctgcgggtgaagcagccggtccgagcttttgcacggcaatctgatgaaaaatctgtttgagcggcggaaagtccttttcatataatgaggtctgttcatcatcaaacaaatactgaaggatggcgattaaatcctgggatccgctctccccgacgattccgagttcagacaggagaaattcgcccgtttcctgaatgcttttttccctaaagccgtttttccccccgccgccgaggctcacaagccggttcagcgaagattgtatgtcatggatcgaccgttccagctcgatgcgctccttgactttttgaatgacattcaagatttcaatgcggttaatcggtttatgtatataatattcgatccccagggaataggcttcaccgatcatttcctttgattccacctgggagatcatgatgatcttccctgagaaaacgccgtgcaaatgacgaaccgtttcaattccgtcgcggagcggcattaaaagatcgacaaataaaatatcaatttgctgcaaattcaggacgtgtccttccaaatcgcagccgtcttccgcttctccggccacttcacccaaatcttcgtcttcaatgatttgttttaaaatcgatcgcacagcacggtcatcatctgcaataaaaaaacgcacaggccttcaccctttctgaatcaattgttgaaccggaagtctgatcgtaaacacaacaccgcttgcatcattccggaatcgaatgctccctccaagctcctcgacagtttccttcacataagacagaccgattccggttgaaggagttccgaattcatcatattttgacgtgtatcccggctcaaacaccacatctccgactttctcgggaatgcccggtccgtcatcttccacgcggcattccagcatgtcatcgccgcgcctatagaggctgagtctgatggagccctgcttttgaatcgcttccaccgcgttcgccataatattattaattacggataatacggtatacacatggtatttcggatgttctccgtctatcgaataatgaaagtcaatgtctttttcgagcgattcagcatactttcgatttatgccggtcacaagccggaccagatcctctgcagccatgtagtctctgaagctttctttggaaattaattttgaaagtccggcgaaaatgcgctgattgtcttttttgacctcatggatttcaccggcgaggcgcagcactttctggctgatctgccggacggaggaattgttatcgctctgtctatttaagagcctgtacagctgataggactcgtttgtaatctcttcagtattcttcaacgtctttttcaaatgaacggtttcttcatataagtttgaaacgatcatcagcatgtgctcattttgttcgcggatctgcttttcccgcgattgcgtttcatacagcttcatgacattaaaaaagctcagcacaataaagctgtgggaaaaagcaatcgccatcatgtcgcggatttttcccggggtgacggtagactcgaacatcatatattgaacggccagttcggctccatcggcaatcagttcgattccgaagccgagaaacccgatgtagagcgggcgaaattgaaatcgtttcacttttgccaagtagaatagaaacgcatatgtgaaataaaagaaaaaagtcggataatggtagtaaaaggatgacagccaatcgatctgccccggcccaaatccatcaagcagcacacgaaatccgacgactgccgcccccgttaaaaagccggacagcacagccggcacattccgcagcagcagcaaaagaaagaagaaagtcggaaccccgaagctgaccctgaaggtctcgttcagcggataaaacttcagctctcctgccagcggcacagttaacatcatcaccattaagatatagccgtcttttttaacaagccgggccgcttttgtcatcacgcttccccgatttccacccatcatgctgatcctccattacaaacgtgttgctttattttggcgttaatcgcacaatatccgcaactcccattttacccacagtcgatttgatttttaaatcaatcggcttattttttaaatttttttgtcgctttttgtaggtttatgtaggttccattataaattgaatgtatattttctctatttgaaaacgcttatatttttccgcaactcactcccttgtgcaatccaaacccctttttcccaggaaagaacaggctttaaaacaacttgtgcggcacaggcttttacccctttgccttctgccgccatgctcaaatcaccgcttttagagcctcgtattttttcagcaaacctgcaggctttaacaggtcaggattggaggaatttcgatgaatgaagtattggaagaacgctatgacgcccgcttctggcaatcccgccttgaagatttggtcgaacattaccgtcctttttcctcaagcggacgcaacgccgaatacattcccgctttaggaaaaatcgactctaaccagctcggcatctgtgtgatcggctctgatcaaacgatgatcaaagcaggaaattcggacgtatcattcacactccagagcatctcgaaggtgatcagctttatcgcagcgtgtttgacgaaagggatttcttacgtattagaccgtgttgatgtagaaccgacgggagacgcgttcaattcaatcatccgccttgaaatgcacaagccgggaaagccgtttaacccgatgatcaacgccggagcgctgaccgtttcgtcgatccttcccggtgaatcggcactgggaaaaatagagtcgcttcatgacgtcattgaaaaaatgattggaaaacggcttgagatcaatgaggaagtctttcggtcagagtggcagaccgcccatcggaacagagcattggcccattatttaaaggaaaccggcttcctcgaagcagacgttgaagaaacgcttgaagtctatctgaaacaatgctctatggaaggaagcactgaagacatcgccttgatcggcatgattcttgcaaatgacggataccatcctttccgccgtgaacatgtcattccgaaggatgtcgcgcggctgacaaaagctttaatgctgacgtgcggaatgtataatgcatcaggaaaattcgcggcctttgtcggcattccggcaaaaagcggcgtctccggcggaatcatgtgcgcggtgcccgccagcgtgaaaagagaacagccttttcagcacggatgcggcatcggcatctatggtccggcgattgacgattacggaaacagcatgacgggcggaatgcttttaaaacatatagcccgtgaatgggatctcagtattttttaaaattacaaaaaaagaggtgaaagcatgcagcaattccttcaagaagtcattggtgtcacaaatgattttctttggtcaaaactattgattattatgcttcttgcttcgggactgttttttacttttaaatctaagttctttcaagttcgcttgctgaaagacatgttccgtgttttaaaggaaggaacgcccgacaaaaacggaatttcgccttttcaggctttttgcatcagcatggccgcgagagtaggaacaggaaatattacggggattgcgatcgccattgccttgggcggacccggcgctatcttttggatgtggatcatcgccatcatcggttcggcgtcaagctttgtcgaaagcacgctggcgcaaatttataaaataaaggataaagacggcttccgcggcggccctgcttactatatggaaaagggcttgaaaaaacgctggatgggcgcggtttttgccgtcttgatcacattgtccttcgggatcgtttttaacgcggtccagtccaatacaataacggtcgcttttgaaaactcgttcgggacagaccgtctcacactgggaattatcatcacgattgttttcggcatcattacattcgggggaatcaaacggatcgccaagctgtccgaatatatcgtcgtatgcctggccgtcttatatatcggcgtcgccgttttcgtcatgctgatgaatattacgaaactgccggacgtcatctctttgattatcggtcatgcgtttggccttgaacaagcggcgggcggagccatcggcgcggccctgatgaacgggatcaaacgcggcctcttctcgaatgaagccgggatgggcagcgcgccgaatgccgcagccgcagccactacgagccaccctgtcaaacagggccttgtccaggctttaggagtctttacgagcactttggtgatttgttcaagcacggcttttatcattttgttttccgatgcgtataaagagccggggcttagcggaatcgagttgacgcaagcgtcgctcagcacgcacatcggagcatgggcctcaggctttctcgccattatggtgttcctgttttctttcagcaccttgatcggaaactactactacggcgagacgaatatcgaattcctgcacacgaacaaagcatggctcttcatttaccggatctgtgtgcttgcgatggtcatcttcggatcggtatcaaaagtccagcttgtgtgggacctcgccgatttgttcatgggcctgatggtcatcgtcaacctgattgcgattttcctgctgtcaaaagtggcatttgccgccttgaaagactatgtgaaacagcgcaaagcgggcaaagacccggtcttttataaagatgtcattaaaaaccatgaaggcatcgaatgctgggagcactccggcaccgaacaaaaatccgaaagcaaaaatgcgatataacacgaaaagccgccgggtacggcggctttttcacgttcattttaaaaccgcttcacgccaaaaggtataaaacatttttcctctcgtatccgtcatgtctccgaagatttacttaacctgctttggcagaaacggggttcagccatgaatatgaaaagaagccggataggccggcttgcgctgacattcgcagcgatggcggcggggcttgcttcaagaaagacggccgatatgctgccggacatcgtgaatgtatatttaggggatgcgctgtgggcgctgatgattttcttcggcgcaggctttctgttcaaaaacgcgaagacggcttccgcggcgctgattgcgctggtgttttgttttatgattgaatgcagccagctgtatcacgctccatggattgacaatatcagagccgctccgctcggagggctcattctcggttatggatttctgtggagcgatttattggcttatgtgctcggcgtttccgcaggcgccgcgggcgaaatgctgttccgcaaacgaaaaagacagccgtaacgccgtctttttggggaatatttacacactttgattttgagtctttttacggtttaaaacaaacatagcaagtccgataataagaaagatgggtccaatgagtaaagcacgatacagaccggcatttcctgtattcggcagcgggttgcctcctgttttttcgacatgtccagtgtctctatcctttttggcaggaggagctgcggtatttgtctcttccttataattctctaccgcatgctttacgatttgcccatcttttttagcttcaaattcgaatctctcctcatttaaaatagatcctcagggcaatcgtttccgtgtgtttgttaaaacgggcgatcccgttttcatcggttttcccaaaattcccgcaccaattgattagtgaaacatactccattgctttattagccgttgtctcctccatatcctcttttttggtttcagaccgccgccgcgcttttattaaataatattcccgttttttaggcagactacctgaataaaggaggcaggtcatatgaaattaagcagcaaactcatccttggattaacggtttcatcactcgccggcaagtttcttgaaaagttgctgattcaagataatgtcagccccaatatcacggcgtcatttaatcaagaagcagatattccggacattgatgcgtcctcttacatccatcatttcgcctcggtcatcggcagtgtggtcatcgggcgcaacgttttcatcgggcctttctcttcgatcagaggagacgtgggattaaaaatcttcatcagccatgactgcaatatccaggacggagttgtcttgcacggattgaaaaactatgaatacaacagccctgttactgaacattccgtttttaaggaccgtgaatcgtattccatttacataggcgagaaagtgtcactcgccccgcaatgtcaaatttacggccccgttcgaattgacaaaaatgtttttgtcgggatgcaaagccttgtttttgatgcctatatccaggaggatacggtgatcgaaccgggagcaaaaataatcggtgttacaatccccccaaaacgatttgtctcggcgggtcgtgtgatttcaaaccaggaagatgccaaccggctgccagaaataaccgattcctatccatatcatgatctcaactccaaaatgacatccgtcaaccttgaattggcaaaaggctacaaaaaggaagaaagacaatggaaactgtgaaagaaattttggttgtctacgggcgaatcattaccatccttccgcttttattggttgtcacattgttcatgggaaaacgctcaatcggagaaatgcctgtgtttgattttttaatcattattacattgggtgccgttgtcggagcggacatagccgatccgaagattgaacatttgcataccgccgctgcggtggctgcgattgccctattgcaaagactcgcttcaaatctcatgatcaaataccgaacgctgggacgtctaattacatttgaaccgaccatcgtcatcaaaaacggaacgtttatcgtcggcaatctgaaacgaatcaaatattcagtggataatattctgcaaatgcttcgggaaaaagacgttttcaatgtcagcgacgtagaaatggcgtttgtagaggcgaacggaaatttaacggtatacaaaaagccaaataaaatggaaatcacagctgaagatatgggaattcaaaaaagcagcggcgaattttcatatccggtcatcgttgacggaaaagtgtacacgtctgtccttcagcaattgaatgtaacagaaagctggctcaaaaaccagctgaagaagaaagggcttgaacgaatggatgaaatctttttcgcttcggttaatcaaaaccatgaactgcatgtttcgctcgataatcaaacgacgaaaattgagccggagcttttgcattaaaaagctccggcgtgttttaaattccgccggaactgccttttttcatccgccgctttcgggacagaaatcgttgtgaatcatataatattcgaacacccgctgcagccactcttcttcttcttttgtaaatggtgaaggaaatttctctgccagctgccgcgattctattgtctccatctgtcctaaagccgacagcacgccctctccgacaaactccaaactcgtcttcatataccggtctgccatgtcctgcacctcggggtcatcaaccggttttcccatgagccgcttggcttccttagataaacgaacatactcttgatccaatttggccatctcttcctctgatttgccgaatacatcatcggcaaaacttttagacacctgctgttcaagccattcgcgctgctccttctccgtctggatgctgttcagcaggctcatgaaaacagaactgtcgatttcctcttcctcttccagaagaccgatcgtcctgtcgatcgctttcagccctgtttcaatatgctccttcctctcctccagcacccttttctgctcctgcagcgcctcaatcagaccagcatcgaagcatgcatccttcatgaaagcgcgaatttgttcaaggctgtaccccagaaacttaaaacatatgatcttctgcaaatctttcgcatctctgtctgtgtagagacggcggccggttcccgtctctttttcaggtttcaacaggccgatttcatcgtaataatggagcgtccgaatggatgtccctgtcatttctgagaaaacaccgattgaataatactcatcttttttcataagagtcacctccaactgacgattcatatccatcataaagcctcacgctgctggaggtgcaagcttatttgttcaaaaatcgtacgatgctgcgcagattcctcaaaagcaacttcagtttttaatccggagcagattcgtcgatcaagttctgcaagtctttttttacagtccccgcatccgttccaatcacaatttgaatatgatgccgatcaattatgatcacaccgtgcgcccccaatcgctttaattgggcttcatccgccaatgacgtgtcttttaatttcagtcgcaaacgggtaatacagttttcacaagtgacgacattctcacggccgcccatatacttgagaatacctgccgccatagactgctgcagccggtctccttcaggtgtttcctgctcccttccgatcaccggaacgtttcgctttataatcacaaagtaaaacgtaacataatagagcgcgaaaaaagcaacgcccaccggtatgatcaataatccgccgtctgacaaattaagattcagcaaataatcgatggcgcccgctccccatgagaagccgtgacgaatccccagcaaacagagcaccgctccggcaagtcccgtatagaccgagtgaagaaaatacaataaaggcgaagtaaataaaaacgtgaattcaaccggttccgtaatcccggtgatcagcgatgtggctgctccggaagacatgagtgctttcgtttctttttttctcgttctggctgcatgcgctattgccaaagcgatcgccggaatgccgaacatcatcgtgataaaaaacccgccgagaaagtagccggctgtcgggtctccattcaaaaaccgtgtaatttcccctgtcaccgcttctccggatgccgtctcatagcgcccaagcccaaaatatatatacgtattcatgacatggtgaagtccgaacggaagcaaaaaccggttcagaaatccgaacacaaaaacaccgaaagcgccaagaccaacaagcgactggctaaaagcgtcgatcgccgcctctgcgtaaggccagacgaccgaaaaaaaccctgccaccggaatcgtcaccaatacgatcattgtaatcggaaacttctctccgccaaaaaaagaaaacatgcttggcagtcttgcatgttgaaattgattataaatgaaagccgccatcaggccggcgagcaccccgccgaagacgctcatatcaaggtccggattcaagatgccgatcccctcttttaacacggttatcgccaaatatcctgtcagcgcaggaatccctttatcttttgaacgggcaaagcccatggcgatgccgatcgcgatcaggacatccatattgttcaaaatcacgcctgacgcttgaaaaagcggtatatccagcatatcctccgcagaaagccgcagcagcagcccggcgatcggaagaacggtaatcggaatcagcaaagactttccaagcagctgaagtatatgtttcattccggcattctccttatgtcaaattcctaaatgatacaagctggacatccgcaagcttgttcaagcggatgacaacgtccggatcggttaaaaactcaagttcatcgactcttggataagtatatgaagagttcgtcaaaagctccttatcgaggtatgccgggtgggtcatgacctccacggtattatgtttttcaaacagttcagagacggcttcttcaccctttaaggccgcttcaaggacaggtgagaaagagtctgtcgttttcactcctttttccgttattatggcgctctccatattacgtctgacaggcaggcgatactccttggcgagcgacaaaaatacgtcagagatgcccggataagcattgatgtgatggtggctgtccaaatgatcgggtttcaagcccatgttgatgcatgtttcaatctgcgttttccactcgcggtatacttcatcggcatctattgtaaaagcaccttgataaaatgcgagattgcgaaaacttccctttgaatcgacaatcgtccggtggtcagacaaaagcggccttccgcaggtcagcaccaaatgtacgccgatcccaagtccgggcgattcgcgagccagccgggccgcgtgaccagcgcccggcatattcgtcataaaggtcgctgatgttaaaattccgagcttataggcatcaataattccgtagttcacacctcttgaatatccaaaatcatcagcattgataatcagttttttcatcgatccgataccccttatctgtttttttaaaaaagtatgcggcggcatacggttttaccctaaatagaaaacgacaaaagtgactggtgaaaactgatgattggtagattgacaaaaacctcccgagtcttttaaactatttttcatatattttaaaaaactctaaaaaaggaggccggggtctcgaacgacagagcctcaacaatgagatgacaaatccgatccgaacttctttacaacaattttctgtcattatacttgacggcgcgatggccaccgagcttgaacggtacggctgtgatttgaacgatagcctgtggtctgcgaaaattctcatcgaaaaccccgagcttatcaaacaagtccatctggattatttccgtgcgggcgccgattgcgcgattacagccagctatcagtcgacggttgagggtttcacaaaacgcggccttagcgaacaagaagcgctccacctcatccgggagtctgtccgtcttgctgcagaagcacgcgatgaattctgggcggctccggaaaaccgcgaaggccggcctaaaccgtttgtagcagcttcagtaggcccttacggcgcctttttagcggatggttccgaatatcagggaaattatggcgtcacagaagatgaattggccgattttcacaggcggagaatgggcgctttaatcgaagcaggcgccgatattttggcatgtgagacaataccgtgcctttcagaagcaaaagctatcgttcatttattaaaagagttcccggatacacatgcgtggatcagtttcagcgctaaagacggacgccatatcagcgacggtacgaaagccggcgaatgcgcgaagtggctcgatcagcatgaccaggttgcggcagtaggagtaaactgtacgcggctggagcatgtctcttcgctcatcggcggcatcaaaaagcatacagctaaaccgattatcgtctatccaaattccggtgaacagtatgacccggaaacgaaaacatggcatggcgcggcatgtaaagcttctttcggagaaagcgcccgcagctggtataaccaaggggcacagctgatcggcggctgctgcagaacaacgcctgaggacatcaaagccgtcgccgcctgggcgagaaagctggaggtataatggaacagtcaaacaccaatcgccagaactttcaaagaaaaatgcaaacgagacaccttatcatgctttccttaggaggcgttatcggcacgggccttttcttaagttccggttatacgatctcacaggctggtcctgccggaacgattctagcctacttggccggggctctgatcgtctaccttgtcatgctctgcctcggcgaattatcggtcgccatgcctgtcaccggatcgtttcatatgtacgcctccagattcatcgggccgggcaccggattcaccgtcgcctggctatactggctgacctgggctgtcgcgctcggttcggaatttaccgctgccgggttattaatgcagcgctggttccccgatacttcagtctggatgtggagcgcggtattcgctgcactgattttcgcgctcaatgctgtctcagtgagatttttcgccgaatccgaattttggttttcaagcattaaagtgcttgccattatattgtttattatattaggaggagcggcgatattcggcatcatcccgatacaaaatgcagacgctgcaccgcttctttcaaactttgcaggagaaggcggtctctttccaaacggcttccttccaatttttatggcgatgctctccgtgaattttgcgttttcgggtacggagctgatcggaattgccgccggagaaagcgccgaaccggaaaagaacattccaaaagcgatcaagacaacactctggagactggtgcttttcttcatcggaacgattttcgtgctttcgtgcctcattccggttaaagaagccggtgtgatcaaaagcccatttgtcgacgtctttgaccgcatcggtgttccatatgcggccgacatcatgaactttgtaattctgacggctctgctttccgcggccaactcaggcttgtatgcatgctcccggatgctctggtcactgtcaaaagaaaaaactttgcaccccgtatttcaaaagctgacttcacggggaatcccgttgaacgcgctgatcttcagcatgctcggcggcattctgtcgctgctctccagcgtgtttgcgcctgattccgtctacatcgttcttgtgtcgatttcagggtttgccgttgttgctgtctggatgagcattgcggcttcgcagttcatgttccgcagacgctttttggctgagggaaacaccgcagacgacttaaaataccggacaccgctttatccggccgtaccgattgccgcttttctgctatgcctggcatcctgcattggcattgcctttgatccgaaccaaaggatcgcccttttttgcggtgtgccgtttatggcgttatgctataccatctattatgcaacaaaccgaaaaaatagctggaatccgtctgagcccgttaagaatgcaagtttgcatgtttcattttctgaatacgaggaaaagaaaaactaaaatcccgtataaaggagcgaatggttatggaacatgtgaaagcccttgccatcaaaggcatcatgacgattgtgattctgtaccttgttctagggctcgggtttagttttagttttgaaaacaccctattcatcacgattgttcttggcgcagtatcctatttgctgggtgatttgtttattctgccgaaaaccaacaacatcacggccactttagccgatttaggcgtcgcttttcttgtcgtttggctgatggctcttgcgatgggaacggctgccaacaccgctgcattggccgcgttttttgcagctgtcgctatggcgatcggtgaatacattttccatttttacttgatgaataaaggccttggctcgcccaaccgcagaatggaaacgagaacggaataacaataaaaaaagaacgtccagttggctggacgtttcttaattttggatagagattttcccaatacggccgcactcttctgcaaaccagatcgaatgggctgatccggccgctatcccgtgcggttcagaatctgccgtcgggattggatattccgtaatatccccgtcgactgtaatgcggccgatttgacccgcgccccattccgtaaaccacagtgctccgtcaccgcctgcggcaatcgcgtgcgggcgtgcatgcgctgtcggaagctggtattcgctgatctttcctgagaccgttattctcccaatttgatttgcgtttatttctgtaaaccataaagccccgtccgggccggcagtgatcccgaccgggccggattgttcttggggcagcggatactcgctgatgtctccatctgccgttattcgcccgatggagccgctttggttttgtgtaaaccagagcgcgccgtctgctccccttgtaataaatgacgggaaggctcctggtttgggcagtttgtattctgttatttcgcctgaagaggacagcctgccgatttgatgtccggccatatctgtataccacatggcgtcgtcacagcctgcagcgattccaaacggggcagcacccggtggaagagcatactcggttattttcccttgaggcgtgattttgccgattttccccgctttatactctgtaaaccaaagctcgccgtcaatcccggacgtaataatcgaggcgcctgcgctctccgtcggaatcgtatattcggtgatatccccggactctgtgagcataccaatccggttccccttttgttcagtaaaccaaatgcgcccgtttgcacatactgtgatcccgtacggccccgattcggggtcgggaacctgatattcagtcatgcgaatctgcatggataccctcccttcctttttcctgcaagctattttgccccaggcatctctcatttttatgttacctcaggggggagcatgcagtgaaacaaaaaattccatcaatatgaattgtacaggctcactctagtatcataaaatggttttaaaatataacttaattttctatatgtggttcaataaggatttaactgccggtcttatcattttaaaatatttttatattatcgccctatcaattcattgccggcggcatattttgtgtataaaggcagccgctgtctcaagcgcgcccaaaaccaagtaagaagtggatgtgttctgtatgtttgaagatgagagactgaatcgcttgatttacctttatacccctctttatgctgaggattttccgatcattctgttctggattccaaaaagcggctgcacgacgctgaatcgctggttctttttccaaaacggtctgcttgaagatgtcaatcgaagatgcgccggagaagttcaccactacagaaatgcgatctatacgcagaagccgaattatgtgaaggatcttctgacggatttaagagagggtaaaaaggacacttacaaggttgtacgcaacccttttcggagagcagtcagttcctttctggcagcgatttgctccccgaattttatttgtctgttcaacagtgatataaacacagggctttctttcacgcaatttttgcatcatctaaaagatctcgggacggatatcaatgccattgaccgacaccttggtccccagtatatcgaaggagaagaagagtttgtcaccaattatatttacctcgagcaattcagcgcacaaatcagagagattgaaaacaaatacaaattattgaaatctccgttatcacagctgtcacaatcaccgcaccatctgtcagacattatgattaaaaaagggaagtttgctgacaccgttttgactatgtcaaccttcgactgggcgtttccgacttttgagagcttttacaatgacgaaacaaaagaattggtgcacgacatttttgcgaaggactttgaagtgtacggctttgattcgaagcatatcaagtaaaccggaactcggtcatcacattacgatctcctttcaattcgattacattttggaaaattgattccaaatggtttctttttcagagacgatcgtttagaatgcccactaaaggtcattttaagattcacttctgtttgaagaaaggagatatatcatgaaaaaaagcatatcatctctcatgatcggattattggctgtcgtgttgggcgcctgctcttcaaatcatgatgatcagcaatcccaggccagcgatcaagcgaaaaccgcacaaagcgggcagcaggatcaggaaaagcaaataaaagcaatgcagaaaaagcttgatcagcaaaaggttgatgacacaaaaacagtggctgtcgtaaacgatgaaaagatcacaggcaaggactataacagcgtattatcaaccgctcaaatgcaatatcagcaaacaggacaggacccgacttcaaaagatgcggcgcagcaaatcaaaaagcaggcgatcgacagcctgatcggacaggcattaattacgcaggaagcggacaaaaaaggctacaaagcatctgagaaagaaattgaaaaacagctggacgaaagcaaaaagcagtataaaaacgagcaagattttgaggaagcggtcaaaaaagcaggcttaaacatgaacacgctgaaaagcgacattgccgacagcatcaaaacagagaaatatattgacaaagaactgccgacagatcaggttacagacaaagaaatcaaagactattatgatcaatttgccgcacagcaaaaagacagcggacagaaaaacacacctgcgtttgacgatgtcaaacagcaaatccaagatatgctcaaacagcaaaaaagacaggaaaaactcggacagcaggtcgaaaagcttaagaaaagcgccgatgtgaaagtggaaatttaacaaagtcagccatcctgtagcggatggctgacttcgttttatttattaatatcttttttggacagatggccgtctttgatcacagtctcattgatattgcctttcgtaacggcatacggctcaagtaaaatcgccggtactttggctttgccgttttcgacggttgtatcggtttgaatcgcttcgcctttcgccgcttgaacagccatttcagcgctttttttggcaagcgcgggaatcggtttgtaaacggtcatcgtctgcgtaccgttcacaattcgtcggacgccttgaatttccgcgtcctgtccggacaccggaattttcccggccaggcccgcctcctgaagcgcctcgatcaccccgccagccgtaccgtcattggcggcgatcacggcgtcgatatctctcgtcttgttcaatgcttttttcatgttctttttcgcttcttctggtagccagtctttcgtatattcgtcaagcacgagcttgactttaccctgccgcttcaacggttcgagcactttcatggcgccgttccggaataagaccgcattgttgtcaagagacgatccgccgatatatacgaagtttcctttcttcgctttttttacaatcgcttccgcctgcagttccccgaccttttcgttatcaaatgaaacgtaataatcaacatccgcgtttcgaatcagccggtcatacgaaatcacttttacaccggcgctgtgcgcctttttcacgatctccgccgcggcatccgcatctgccggtacaacaacaagcacgtcgacgccttcgctgatcaagagctcggcctgctgaatctgaacttctttatttccgttagcggcaagcgtcttgacttcccccccgaggtttttaacttctttctcgaacgcttctttatctttgtaccagcgttcttccttcagcgtatcgatggcaaaaccgacgtacaatttgtcggagtcggcaatcagctttactttttcttcacggttggcgcttttttcagcagaattgaatgagcacccggcaacagctgtgaggagactgaacagcgcaagtgccaacagccctcttttcacatatatcgacaacattaaaaccccccattctgtatcggcatcagagcttaaaccgtttgatcatcacattcatccgttcaaccatctctcccagaagccttgcgctttcgtccatcttttcaatcgagccgctttgctcatgtacggacgctgaaatttcttcagaaccggccgcgctttcttcggaaatcgccgcgatatgctcgaccgagccgttaatctcctcgcttgaacgtctgaaatgcgataatgcctccgaaatgtccgatacacggccagccatatccgtcactttatttttaatctctgaaaagtatcggccggaagtctcaatctggttttttcctttatgaacttctgaaaaaccggtttttaaatcaccggccatggaagatgtttcggtttgaatcgccgtgacgatttcggtgatgctgccgacagagcttttcacttcttcagccagtcttttcacctcgccggctacaacggcaaacccttttccggcgtcgccggcccttgccgcttctatggacgcgtttaatgcgagcaaattcgtttgttcggccatacctgttatcatttcgacaagcttgtggattgactgtgtctgttcctccagcacactgactttttctacggatgcttccattacatgattgatgacattcatttgctccaatgattgagccatctgtttgtcgccgtcgacagacacgtgaagcacttcttttgaaaaccgggccagcgtttcgccgctttcatgagcgtgctgaatttgcccggtgagctcctgtgtctgctcggaaatattagctgcttcatttgcctgattcgtggccccgtttgccaattcttcaacggtgacagcgatctgttcgcttccttctctgacatcagccgagacgctcgtaaacgtaagacattgcttgtcgacttcggctgcgatccctgatacttcgacgatcatctcacgcaggcttccgcccatatgattcaccgcttgcgaaagctggccgatttcatcttttcctttgtaatcaagggcttcaaagttcaaatgaccctttgcaatttcttcgcttgctgccacaacacgcttcagatttttcttgatctgccggctgacaatgatcaggagtcccgccgacacaatcgccgaaatcagaattgagacgcctaaaatataaatggttttcgtcatattggattgggcttgtccaattgactcaacattggttttgacagcgttttctttcaagctttcgcctaacgtcatcgtctcctctttgagcttgttcgcttttttctgaagggttaaaaatttctcggtgttgatttgctgcacgttgggaacaatttcgctgaaaaagtactcatccagtgaatgattgttttcaatgatttgatcgaacatgtcaagctgctcatccgaatgcagctcttttttcagctttttggccgtatcggcaaattcctggctgtacttcatataatcggtcagcttttcatcctgggcgtttatgatgtactccggaatgtgcaaatatttattttgatatagggacatcagctttgccgactgaacggccgtttcatttttcgatttcgtatcctgaaccgtctggctcgtatcttttaacagaccatatgtaatcaaaacggatgttaaaaacgctgttaacatcacaaagaaaataatgccgtatttgccgccgattgtgatattgttccatcttgggcttttcacattgctcccccttcttccaaacaaagtagtttttatttatatcggcggcagctgatacttttttacaaaaatatagtgataaagaccttgtttacaagagtggtttttttctcaagaagtcgctaaaaataaaatacgcctttgaatagttcaaaggcgtataaaaccgggtttattcaagcgactctatcgccgcaatcacatccgcttcatgaaaagatcccatcaaacataaagattcatccggacgcgcggcatgggcggcgatgatccgtttggccgcttcaatattttctaaaatgcccaaatcgctaagtcttctcggaaaaccgagcccttcataaaagggaatcagttcggctatttcatctgtccgcccttctaaagcaagctgcaccagtatcccgtaggctaccttttggccgtgcagcacacgatgggtttcggggatgaacgtcaagccgttgtgaatggcatgggccccggccattctgccgtagcggcccgcatatccgcctactgtgcctgccagcgcaatgaccgcttcgaggacatttgtgaaagctggggaggattcgcctttttcaaggctctctatggctttcaggctttctgtcaacaaaatatcccgaatatagacagactgcctcagccctgtctgaaccatgatagaaagcgaatcggccgtatttctgatgatcgcttctgcctcataccatttcgcaagcgtatcgccgattccgcttttcacataagcgaccggtgaagagagaagcagcagcggatcgaccagtgtcaaatagctggagcgcttctgatattggacgcccgaaaagttaccttcatcgtcatagatgacgcttaacggcgtgcttgccgcacatgttcccgggatcgtcggaatcgtcatgacttcaatgttcagcaaatcggcggctgccttcgctgtatctaagacggttcccccgcctattcctatgatgacgtctgctgattctgcttcctctgctgcttttttaatcttatttagggaactgcagcccgtatgctgaacgactttccaatcggctggaggtgtcgtataacgtgtaaaagctttaaacgatttaacccctgaaatgatgacaggacgttcgaatgcattcgcaaatgacggcagttctttcacgatcccctctctgcaaacgtattggtttggaccgcttctgacaatatcttcaggctgcatatttccccactccttctattcttttctaatatttatcatctcactttctaacaagatgtcaaacgatatcacaaaccgctcagcaaggggcagtgcttgggatacacctcacactgcctgaggaaaagtggacagccggtgtttacagaaaaggatcagagcctgctcgcttctcttgcaccgcttatcggccggcatcttcagcaattcagacaccatctgccaaaaaaagacgtgtttcacatgaaacatgtcggaggcattctgattttgtcggaagacctgcagctcttgtcatgcaatcgagcggccctccattggctgaacatcttgcgcggctgggaaagcatcggcagcgaagccgtgccgagacccgtccgagccgtctgcacgcgcgcagcggctgaaactacagctccggcaaaaacggtcatctcgattccaggccattcctgcctatccattaaagcgagccgtttagacggatttggaccgtcaggccagatcgccgtttcatttgagcctgcttcacccgcagaaaccattccgctgatagcggaagcctacagcctgtccgaccgggaaaaagacatcgcttaccgggtcatccgcggactatcaacaaaagccatcggagacgaattgcatatatcggcttacactgttcaagaccacttgaaatcgttttttttgaagacgggcgcaggaaaccggagggagctgatgtggaagctgcttgatgatgtgctggagtgagaataaggcgggcgaaaactgttctcacgtccgattccccagatgagacacgcagtgttattccccgtgtcttgtcttgcggggatcaagaccagccaattcagaggattttgatgcctctgctatctttttcatcattccaccccgtcctgctcatttaacagctcgtccaaacgcgcaactgcatcctgcttttcaaacgtgctgaaccataggtcgtcatacgaatccaagatgcggtaatggtgagaaatcaagttttgctgaaggcgaaactctccttttttctcaatgtcccgccaccacacctttccgccaagcgtcttcccttttggtctgtcgatgcttcggtgagcaacagtctccaccacctcaaggggctcatccccgaggacggcctgcagcacttcactgttccgaaaaagcgcgcataccgcgacaacatgcgcccagcccgcagccgacctgcccttttcgatttgcacgagcgttttcttcgacatcccgagcacgttcgccattttctcctgcgtatagccgctttccgcccggattaatcttaatttggatgagatcagttcggttatgtattctttatccatggagaacctccattgtaacttttagtgtaattttacaccaaaagttacaatggttcaatctttataacccgttttttgctgtcagtttaatcctctccttatgatattcaccattctggttcctttccacgacagcttcaaattgctcacttttttctggggcatcacctaaccagacaacattgactatatcagaatgtgttccgccttcctcttgctcatccttttcgtaatcaaccgtctcttttccattcacaaaaaacacgactctctttaactccgcatcttcactcgttttcttcgaaacatagccattccaatattgatctcccctttctttagaatacgagagctcccattccccgtctgaagtcagttcgctcagtttgctatgttcaaaaaacagacagtaaatcgtgattccgatgcccagcatcatcgtgaaggcaattgatgcaatccatttctttttcactttcagtacctctttttttcttccattgtatcctttttttcattaagcaacatcatacaagaaatctcccataaacatgataaacttaaacatcatcacaccaaggaggcccgccatgcgaaatgaaacccgcacgcttttcctcgaccctgatctaaatgttgaagcctaccgctttaaaggcattatccagaagtttccgaatcacttccacgagtattttgtgattggttttattgagaaggggcagcgctatttgctttgcaagggagaagaatacatcattaatcaaggcgctctcgtgcttttcaatccttatgacacgcacagttgcgagcagattgacggaaaggcgctcgattaccgctgcattaacgtgatgcctgatgttatgagaggatttgtgaaggagatcactggggccgacagcctcccatatttcacggagaatgtcttgttccgccatgagctgaacgccagcttgaaggagctacacattcaaatattgcaaaaagaaaaagccttgaaaaaagaggagctttgtcacgtttcttgaaaatgcacctgaaccgtccgacgaagtcaaagcggtgtgcagttatttggaatcccattaccaggaaaacattacgcttgaacatttaagcaggctgacaggctggagcaagtatcacctcctgcggtcgtttacgaagcagaaaggaatttccccctacagctacttggaaaccgttcgtatcaatcatgcgaagaagctgttggaagaaggcgtaaaaccaatcgatgcggctttccaaacaggcttcagtgatcagagccatatgacgaaatttttcaagcggcaggtcgggctgacgccgaaacaatatatgaaaatttttgaatatgacaggcaggagatcaaaggatgaagacaagacgcgaaaccgccggacacctcgcagctgtgatcacgatcatcatctggggtactacttttgtctcaacaaaggtgctgctcgaggatttcccgcccgtagatatattgttttaccgttttctcatcgggttgattgtgctgatcatggtgcatccgcatgtgctgactttccggagctggaggcaagaagcgctgtttgcgggagcaggtttatgcggagtgacgctttactttctgttggaaaacatcgcgcttactcttacctacgcctcaaacgccggcatgatcgtcgcggttattccgatgatcaccgcggtattggcgcattttctcctttcgggcgaaaagctggagccccgctttttcattgggttcgccgccgctttcactggacttgcgctcattttctttaatggacaaatgatgcttaaattgaatccgctcggcgacattctcgctgctgcctccgcattcgtctgggcggcatatgcgattttgatgaaaaaaatcagcacattcggttaccatacaatccaatgcacacagcggatctttctgtacggtttgctattcatggttcccgctctgttcctgtttgatttccgcttcgacgcaagccctttttcctcccccgtcaattggttgaacatcctattcttaggcgcgggcgcatctgcgctttgctttgtgacatggaactggtcggtcggtgtgcttggagcggtaaaaacgagcgcttatatctatatggtgcccgtcatcactattgcggcatccgttatcattctgcaagaaaaactgacatgggttgctttttgcggaggagcgctcacattggccggcctttatatttctgaaacaaaaccaaaaccgcagctgaaggaggaacaaatttgagggaagagacaaaatgcgcactgatcatcgatgaaagcctgccgctcgggctaatcgccaatacagctgccatcctgggggcggccctcggcaaaaacaaacccgatctgattggagaaactgtaacagacggctcgggaatcgaccatttaggtatcgtcaaaatcccaatccccattttaaaaggcaatgccgagctgcttcatcaattaagtcaaaagctgctgaccgacgaattcaacgatattctgacggttgatttcaccgatgtagcgcaaagcattcatacatatgaagcatatattgaggcatttcaaagcaccgcagcttccgattaccgctattttggaatcggcatttgcggggataagaaaaaagttgcgcggctgacaggaagcttggggctgttgagataaacaagatacggaaattgacttcgcttcatttagtgaaggagtcaatttccgtatttttttatgtcatatgtttgagatctattagtgaaagcataatgaaagaaaagaagaacaatcggggatgcagctgttgtaatagcgtgctgaaatcgctattggcacggcgttgtctgctgtgttatttgcaatatttggcgaactaatatctcattaatttccttatttaatgaaaactgcataaatacataatataatatatttatgcagtttttctaatctttaatatatatcaagtatcgtggaggcattaacattgaacacagacaaacaagtattcattgaaacgcagaaaacagccaaaacccttaaaacttagtgcagcatttttcagtataatattggcttcgttcataactgcaattctttctggtcaagcagattcgatattccctttcatttccggcatctccattataatattagctgtcatatttacggggtgtttattctgggtgcttagacagcttgtcatcctgaaaaaaaagccgattcaattcattacacacttttccaagaaagccgagtttgcacgtatcgtaaaaatgattgattatgttttacaacaaaaatacaaaaaggcattaaaaaatataccgaaccaataaaatctcatgttttttatgaataggagtgacaatccaatgagaaacgaaaaacaattatttcaaaaagctgaacatacagccaaacttcttgagtctcacaaaagtgacgaagagctgcttacataccttgcaaatcaagaatctgttacattaaatcagctaaaaatctatttttcaaatccaagttttacattaacgtatttgattaaagggattttttttagcagtatgactgctgtcattatggcggcctttttatctggtcagatctcctccctcaaccatggtctttcaaggctattttcattcttcttcatgttctatctgatcttctcttttctttggatcgtcaagatgctgatctcctcgcgaaaaggaccgatgcaaacaatcctgcacttccaaaaaagagcggaatattccagaatcacgggtatgattgatttcattttagatgaacgctttaaaaaggaattcaattagaaagcagaggaacattcacctctgctttgattctctatcattcaaactaaataagaaggagaccaagacatgcaaacagacaaacaactattcgaagaaacaaaacaaaccgctgaaactctattgttatcgaaagctgaaaacgatgaagagctgatggcatacctcgaaaaacaagatttatccacgttaaaccggctgaaagtttatttttcaggtcctacgctaaaaatcagccacgtgatcaaagcttcgctcgccagttccatattcgcctccattgtaactactgtatgttcgggtcaagccaattccattttacccgacgtttcaaaaggttattttccggctttgttatcgatattacttatcatgagctccatctgggtgttcggcacgatcactaaatctcaaagaaacaaagaacaaaactttttacactttagaaaaaaaacgaaccatacaaaaattattggaatgattgatttcgttttggaaaataaatataaaagtatttcaaattaaaaaaaagcatccctaaagatgctttttttatgcttactcgccgctagacaaattctgtcttctctcctgctccgcaatgatttcattgtcctcggcattgtctctcgtcactttctgggtcaaaatcgcgccgaccgccactaaaatcatcacggctatgtaatagcctttttcattgagctgcagattgtccgcattgtatagcccgataccaaataaaaagactcccgcgaaaaatgtgaaatatgacataaccgtaaaggccgttgtgtttcttcttctgtatttatgcatcttaatacctcctaaagaataaaaccattatacttgatttacgtctccagaagaagaattctcttccttttttctcgcaatttagtaaatatgtaacaccttgataaaaaaggcccacaaaataaaaaaccgggaatgactcccggttttttaatgcttttcttcgcctaaaacagcttcagcaatattgacggcatggtcgccgatcctttccaggttgctggtgatatcgacgaagatcacgccggcttgtccgctgcataatccgtcgtttaagcgaagaatgtgctttttgcgaagcttgcgttccattttatcaatctgattttctttttcgactacgcgtcttgcggcatcttcgttattttccccaagagcggtgatggactccttaacagtggaaatggtcaggtcaagcatttccgttaaatcagccattgccgcttcggaaattttcaccctgttggattgctggtactcaccaagctcaaccaagttttcaaagtgatcgccgattctttcaatgtctctgacagtatccattaacatatgatgttcttcagattcttgttcagaaagcgtagtggcggacaattcgatcaagtaatcggttatcttcctgtccaaattgttgatcgcatcttctatttgaaaagcgctttgcgcatgttttgcctgttttgtattaaaaaactcttttgtttcctcaagtccctttaccgcaaattcacccatgcgcaatacttcttctttcgcctgtcccagcgcaattgaaggagactgctgaatgaacagcggatcaagatgtgttgctttatagtccacaaccgaatctttgcctggaatcagcttcgtaacgatcaaagccaatatgccgacaaacggaagctgaatcagcgtattcgacgtattaaagatcccgtgggcaaacgcaatcaccatcttagggtccagccctaaagaggattgaagcattaaaatcaaagctgtgaacggcttcagcaagatcaggaaaatcgctgttccaatcaggttgaacaatacgtgaacggccgcggcccgtttggctgccactgaggcgccaagagatgccagtacagcggtaatcgtcgtaccgatattgtctccgaataatacaggcagagcgccgtttagatctattaatgaatcggcaaacagcccttgcaggatcccgatcgttgcacttgagctttggacgagaacggtgaaaagggtgccgacgagcacgccgagaataggattcgcactcatgctgactgttaaatcatgaaaagcttcaaccgtccggagcggcttcatcccgctgctcattaattccaagccgtagaaaagcgcaccaaatccaaacagaatttgtccgatgttctgaaattttttgctctttaagaaaaacagcaaaaatgaaccaatggcgatgatcggaagcgcatatgccccaacgtcaaagccgataataaaggctgtggccgtcgttccgatgttcgcacccataatgacgccgatcgcctggcggagggtcataaagccggcgctgacaagaccgacagtgataacggtcgtgccggaactgctttgaattaaaaccgtgacaatcatacctgccaaaacacccatcagagggttgcttgtaaaacgatctaatatgtctctcagcttatctccggctgatttttgaagtccttctcccataaacttaataccgagaagaaagatcccgagacctccaatgaattcaaaaagcaatttctgcacatctatttccaaagtcgtgcccccctaattcgacataaatctacaaaccaaacactatgattatgatggagattaaagcctatgtaaacgattcaaatcgaaaatttacaataacttaacattgccggctgatgatttacattcccttaacattgcctggactcaccgcaaatataccccattccagctggcgaaaatcccgaactttttcataggtcaaaccgtatttaaaactaaggagggttacatatgcagaacagagccgacggttctaagatcaacattcaaaagacaaaaggggaacgggtttggaacgcatttggctatttcttttacctgggatcgatcattctattggccgctgtctggggatcgctccccgaaaaggtgcctgcacattacaacgcactcggtgaagtggatcgctgggggtcaaaatgggagcttttcatattgccgggaatcggattaattatccttctgttcatgcagttcctagaaaagcaccctgagattcacaatcatccaaagcgcctgaatgaaacaaacgctgaacacttctacctgctcagccgaaagttgatcaaccgcttaaaaaatgcatgcttaatcattttttctctcatattaattgaatccgtgtcaatcgctttagactggggaagcggatttggcgggtggtttcttccgattgccttactcggcactgtcatgcttgtggccataggtttaatacagcaaaggaaaatcaaataacggtcaggtgcatatttgtgagttttaatagtgaaactgtcgcgggggatgatggatgagccgcaatccaaacagaggctactatcgaggctctttacaagttaatacacactgcaaattcatgcgctgccatcagctttcagtttttcttctcaagcagccgcacatgcctgtctttttattccttcatcattagctctggaattcagtcgatattttacttattttaataaaagtaacttaggcataaagtatgtgcggtaattgtggcgagtcttttttgatctatcttttaaaaaaagagtgatgaacactgtaattctgttcatcactctttcgaatcctattgatcattatttcgcttctgagattcttgcaacgatttgagccaatccttctttaattggcgtgagcggacggccgagcactttttcaaaatcatcgctttcgacttcaagtgtgccttcacgaatgcctttttggatatcgacaaccatcggaatcagaaaatccggcacacccgcatttttcatgatatcgcgataggcagcatcgtcaacatgctgaacgggaacttctttgcccaatacttccccaagggctgaagcgatttcttcctgagttaatagtttgcctgaaagttcgtaaacggtgttttcgtggccttcgccggacagaaccgctgccgctgcatccgcgtaatcctgctgcagcgcccagcccactttgccattctctgctgatgtcacccaaggggctcccgccaaaacgccttgaatactcgacatttcattttccaagtaccagttattgcgcaagaaggagtatggaatccccgtttgcaaaatcgcttcttcagttgctttgtgagtcggcgcaaggaagtttttgctttcgcgggcattcgcaatgctcgtataagcgataaaccgaactccggcgcgctctgcggcagctaccgcattgccgtgctgacggattctcgtctcattgtctccatcggcagagataatcagcagacggtcaatgcctcgaaatgcggattccaatgtttccgggcggtcaaaatccccgtggcgcacatcgaccccgcgcgcccgcagcgcttccgctttttccggattgcgcacgctgaccgccagctgatccgccggtacagtttccagcagcttttccacaattttcgatcctaattttccggttgcccccgttactagcattttcatattcgaattcctcctgaatgttttaatcttgatctgtaacaaatttcgttacacttgatgtaactatcataattacaaataggctgctttgtcaacaggaatgtcctttaacctggctaaaacgtaatatggtttgtggtatgatcatgtcaaaaggaggaagtgatatgagaaaaaacgctgccactgaagaagccattcaaagatggaaccggtttgcagatagctatgctgcaaaccatactgaacaaggcgatatacataaagaagtctttttgaaccccgtcatcttttctctcattgaaacggtgaaaaatcaaaaagtgctggatgccgggtgcggagaaggatatttaagcagaatgctggccgcccgcgaagcagttgtaacggcggttgactattcgacaagaatgcttgagatcgccaaggaaagaacgccggacggattgcacattcattatcggcacggcaattgtgaggacttgcattttttagatgagcaaagctttgatatcatcatatcgaatatggtcatccaagacctcgcaaatgatgaaaaagcgtttcaggaaatgcacaggttattaaaagatggaggatgctttattttttcaatattacacccttgtttcgtcaccccggaaagcggatgggaaagaaccaaagacggccaaaagctccattggaacgttgatcggtatttttacgaaggcgcatatgagcagccgctgggcggcgaggagaaaatgtttctttttcacagaacactgacaagctatatcaatacgatcatcaaagccggctttcaattagaagcggtcgaggaaccgagaccgtcaaaagagatgctgaaaaaatacccttcatttgaagaagatctcaggtgccccgatttcatcgtttttaaattaagaaagcccggcggcgatgtccgataggccccgaatccgatagaccttttcctaccctttttgagtatttgtttttcttcgcggccaaatgacggctggaatcagagccaaggataacagcccgcccgccaaggataacacggcatagcttgaatgagcgacaaccattccggaaagagccccgccggaagcccccgccaatgcgatcaaaacatcaagcgttccctgcactttcgcacgtgttgaaggctcggtcgaatcgataatttgtgcagttccgctgattaatccaaagttccatcccaatccaagcagcgaaagggcaacgatcaataaaacgagcgaatcgctgggagccagcgccgccactgcaccagcgagcagcagggtcacccctgaggcgatgcttatggctgtccggccaattttatcaacaagaatccctgtgacaagtgacggaagatacattgaaccgatatgaaaacctatcacgatcccgacatctcccaagctgtgtccgtggtgctgcatatgaacgggcgtcatggtcataatcgcaaccatcacaatttgggtaagcaccataacagcggcaccaattgtaatccccttttgatcgtccgaagcaccggcagacttcgtttcgtctgctaatttattttcttgtctataggtttcgatttttttggcgatctccaacggatccggccgaagcaaaatataaagcacaagccctgccaaaataaaagctgccgccgataaaataaacggtcccgcaagtggcggaacgccgatgatcgaagcaaatttccccatgacatccaccaaattggggcccgcaaccgctccaaatgttgtcatcaccattgtgacgctgatcgctttagcccgctgctttttatcagccaagtcagtgccggcataccgcgcctgcaagtttgtcgctgtgcccgctccgtaaataagcagggaaacgaacaacaatatgatgctgttgatcacggccgcagcaacgaccccgattgcgccgatcccgccgaccataaagccggcggttaagcccgtgcggcgcccgtaacgctgagaaagtctcccgacgccgaaagcggctcctgccgatcctaaagtaaataaggcagaagggactcctgaaaacgcatccgtcccaagcatttgctttgctaacagggcgcctaccgtaatcccggcagccagccccgcaccgccgaaaatctgcgacagactcacgatgaataatactcttttgtacaatctctttaatcgatccggagaatctatgtaactctcaaccgttcgttcagaataccccgccacctcaacaccttcttatttaaaatttgtccccgctttcaatcacggcggttcctttcgtttatgaatagtttgaattttactacaaaagaaccttttgtcaatttgctaagggcatgtccccttcaacattttatgaactgaatttatcatattccgattttagattgtggcggcattgcgggcattaaaaaaactagtcaccgaatcagtaactagtcagatgatgtgcttttatttcttgacttgcgacacggtcagtccgtcaccgatcggaatcagcagggattctaattggggtgggcggcgacgccttgattgaattttttcattgattcggtatgtcgcttcggcatagcattatcgtccgtgcactaccgcatgcaagtacgttatcggcaacgattaacaaccaaaatggcaaacaagacgcttcggcgcgaggggttcttctgcttttctatttctccgtcaatatatagccccaatttgtctcattcctttgttttgaataatttataatcatactttaaattcaaaacctgaagaaagaggggcgaaaaatcttaagaattaactgagctcttttaataacagttggtctgcttctctttccataaaataaaatagaagaagttaaccttagaaacctcttcttttgatatttggtatattaaatcatgtaaagacaataatgaataaaaattcgtttataaagcaggtgatcccatgccaacgaacagattaatcaacgagaagtcgccatacctactccagcatgcacacaaccccgtcgactggtacccgtggggcgaagaagcctttgaaaaagcaaagcgcgaaaacaagccggtacttgtcagcatcggctattcgacttgtcattggtcaatggttgtattccataataaaaagaacctgaaaagtttcaggctctctttttttaaatcattattgatttgaatttttttctcttttaacttcaagaaaatgaatctgccgcccatctattttttgcactttaaaaatataaccatcagcttctagttcagaaccagcttctgcatccatgttttgagtcatgaaccagccgcctattgtgtccacttcctcatgagataaattgatatccaaaagatcgttgacatcttcaattagcagctttgagtttattataaagtgaccatcctttaactttcgaatatccggaatttcatcaacatcaaattcatctctaatttctcccacgatttcttcaaggatatcttcaactgttactaaacccgacgtacctccatactcatccaataagatagcaatgtgaattcgctctttttgcattttcgtcagcagattaacaaacccagctttgtataataatcaattgttctcttcgttaccttagttccttccgccaactcgccgattttcagctttccagccccatcaaatccctccaaaccataacggttattgcagaggtaaagagaggcgaagagatcaacaagaaaatatcacaggaaagtttgtctttgattcaacttcttttgttgattacttaatgtttattcaatcctttttttcagattaagatatgtgtgacttgctcgctcacattgaaataagcaaagatcggatgaaggatcacttcgaatgtcgactctccaacccatccaatacccagcgctgtaacggttatgcccagttggcaagccgataaatattcatctaaatgggtaactacttttttggcggataccgctccttttttcccttcaagtataagccggtcaattttagttgcccgcacttttacgatcgcaaattccgttgcaacaaaaaacgccgttaaagcaatcaataccgcaaaaataattaaattaatggctgtcaataagtcgtcttactttaaagtaagacttacacctcccataaaagaagaagcatttgataaagctaaacgcgagaacaagcctgtactcgtatctattgagtatagctagtttggttattctaatggacatgccttggtgtcataaaagaagaaagcaccaggttataaaaataaaattaaataagaaaagagtgtaagaattacaaatagagtggtcatttaaattcctgtttcaatattttttagcaacaaaaaagccgctaaatctggcgactttttcaaaagatcatcaatatttagttagtttgatatttatatactagtgatttaataatttttatatcatttttcacatcatgataattttgataatttaaatctctttctaatatgacccccttgacaggagcttttttaataatatactcggctagtttccatacttctttatgaacaggttcagaatgagaatctattaaaaatccatacttatttctgataaatccagctacgtgtaaataatttattttatctttaggtagcttatcaaaaaaagcatatggatcgtatttatgatttatactatttatatataaatttgatacatctagcaacatacctatgtttgtttcattaagcaatttataccaaaaatccaactctgaaaaatcattgttatgccaattaaaggtataagttatattttctaaatacaaattttttaatcttccttttttcaattgatcatatttgtttattaaaaactcaaaagtttcttctttatacattactggaaaaaaatcgagtaattcgatatcttttacactactcattgctaaatgatctgtatagctattaatttgtaattctgccaacaaattggatatttgtttttccttttttttagataaaggttcataagttcctattgaaagagaaagtccgtgtggaattaagggaaaataatttctaatagtattcaattcctcttcattctttttatcgaaatacctttcagaaataatctctaaaaaatcaacatcctgcttaattacatctaaatccttaaaaaaattttgacgaaaactcaacccaacaccaatacaattggacaagaattatccctccacatcaactttattttctactttatgtagagtgtagaaaaaaaggcatattcgacttacacttgttaaaataacaaaagacataaaaattaataccccgaatttttcaacaacaatccaagacaatgataaggctataatagtgcctaaatctgatgaagacgttataactgatgttacttttcctttcatatgacttggggcgaaaataaacacttttgaccttaataaattatttattataggggtacctaaagtaaataaagaaaatcctattaaatagacaaaagaatagctagctatcgtcattaacaacaatccaccaactacgagaacaaaacttattataaattgatgaatatactgtaatttaaataatttaagtctcgaaagcatcaagttagccgtaatcgctcctactcctcctatcaaccaaaacaaagaaattataagagaagaagcatttaaattcttttcaagaatatatatcgataagcttgttaaaacaggaaaagttaaaccatttaaaatttctattatatttagcctttttaataattgatttttataaacttctttgaacgaagaaaaaatgctctcttttttctttttattatttacataacctaaatcttttattgttaatattaatgttattgcaatcaatatagttaatagattgataattaatgagtatgcattaagccaatgatacatgagtggtcctaatgagaaaccaactgttttactaatcaaaaaccatgagtttctaccacttatttcggaagccagggtctcttttgagcaaagtgaattaaaccaaaggttttgattcatgatcgatatggtactgaaacattgtgaaatcaacatgatagggaatataatccaagttaaaccgagtgataatcccaaaaataatagtgaataaaaaaaccaattaatacttaaacatcttagcattattcttttactcgatgatacatctgctaaatagcctccaaaaaaggttgctaatatacgggctattgctgaagtaaaaaataatgatgatgtatataaaaaagatcccgtaatcgaatatgcataaagtggtaaccctgtccatacaatggctgcacctaggctatcaactgttccaactatgacaattttatttttaatgttgtttagacttttcattaatactttctctcttccatatgtccaacagacctaattttttaaagttatctatagcaatttttaactgatttttttcttgagtatttaaagaattatgtgttagattagttgcttctttaatacataataaattcttataattttcaatccatattgctacactttgttctatcttgaatactctaaccccttgttttccttttatatacaagtaattatgttttttagtctctgtgctggttatgttaaaacatgtaattggataacagaatgcatctacaaaaccattcccttttccaattgtaactaggtatatatttaattcgtgtttagccagctgagctatatagctttcgtttcctttttttttcgaaagaaagtttacaaaagagtctgcatcttcttcaactctttgaccggtataattatgttgattgcagaagttcttaacaaacttttcccattcccttgttttttctttagttttaggaaatacatgattaaacctaatcgcccgtttattaaaatgtaacttcctaaaaaaatcaaaattaacccaatcaaagtgattctgttttttgtattctttcagataattctcatctgttacacacttaaacatttcatattgtttttttaaaagagtcatttacctcatcctttatagggagaaaagggataacgaaaaaatcgttaacccttttcttccaccttacttattatcccaatcgtagcaagtttcttctaattctacttgagacacattttgaatttcttccataattatatcctccttccgataaaattgaataatcagattattcaattttattataggtagatatcctatatttgtaaagggtttttttcattttattcatttttttgtgatatttacttgtttaaaatacttttttatcaagatagcttcaaattagatgaagatttattaaaaacttttatactttctttcaactagacactacgtgtctttatttgctgcaaaatattttttttaaagctttcaattgaaacatttttttgttgttcctctccatactttcttacatttactccgttttctttaatttcattgtctcctactactaatgtataggggattttttgaacctgtgcttccctaattttgtaccctaacttttgattactctcgttaatttgtactcttatcccgtgttgtttgagttccgacttaatccctaaacaatactccaggtgaatatgtgaaataggaataatttgaacttgaataggggcaagccaaacaggaaaaacacccgcaaaatgctctattaaaattccaaaaaaacgatcaatagaaccaaaaatagcacggtggataacaacaggacgaactttttcgttattatgattaatataagtcaaatcaaatttttcaggcatctgaaaatcaagttggattgttccgcactgatgactccgttttaaagcatctttaatatggaaatcaatttttggtccgtaaaaagccccatcaccttcattaacttgatatttgattgctaaatcgtcaagcacattttttaatgatccctcagaaacctcccataggtgattatttcctaatgaatcatctggccgagtagacagttccactgaatactcaaaaccaatagtacgatacacttggtcaattaaatgaaataccttcttaatttcactttcaatttgatcttctcgaacaaagatgtgagcgtcatcctgacaaaatgtgcgtacccgaagcaatccgtttaatgaaccactaaattcatgtcgatgaacttgtccatattccgccaatcgaataggtagatctcgataggagtaaagattatttttaaagattagcatatgtccaggacaattcattggtttgattgcaaactttgtattatcgacctcagaaaagtacatattttcttggtaatgatcccaatgaccggatttctcccataatcgataattcatcataaacggtgtatggacctcatcgtacgatgcattattttgaagttcacgggataatttctccaattcttttctaacaatttgtcctttaggtaggtaaaagggcattcccggtgcttcctctgagaacataaataaatctaattgttttcctaactgtcgatgatcatgttttgctgcttgttctaaaaaatatagatattcatttaaatcgtctttctttttaaaagctactccataaactcgttgaagaacttctttttggcgatttcctctccaataagctccagatacacgagttaatttaaatgctttaatgaaaccagttgatggaaggtgtggaccgcgacaaagatcaataaattctccctgttggtaaagagttatttcttggccttttggaattcctcttaatatttcaagctttaatggttcattattttcttcaaataacttttcagcttcctcataagagacaacaattcgtttaatttctatattctccttaataatcttttccatctcacgttcaattgctagtaaatcctcgggagacaaactgtgttcaagtttcaaatcatagaaaaactcatcttcaattactggtccaatacccaaacttacactactgtaaagccttttcacagcgtgtgccaatatatgggtggatgtatgtcttaacaccgacaaaccttctttcgaatctagagtaaaaatatcgagtttaacatccttgtcaagggtatagcttaaatccacgaatttttcatcaacctttgctacaacagcgtgctttcttaaagttgtactaatggattctgcaatacgttttattgttatccccttcggaaattccttcgtatttccttctttgaattgaacttttattaaactttcactcattatagtgcatccccttttaataaaattgatttacactctaaaccctagctttgcaatagccacgttgagtggaaaataaaaaaatgcactaatccccaaagctagggacgagtgcattacccgtggttccacccaatttcccataagttaaatggacaacttatggctctgatgctgtaacgttgcataaacggtattagatacttaagttccctaatacagctcaaaggtggtgagaaacttttctgcgttaggaagatttcagcataccttccctctctgtaaaccgttaaagtcacccatgtccctttcacaacctttagaataatctaaatattcctttttttaatatattttataataactggtcgtaaatatcaacaattgattattaggattttgtattatccatcttaatttgttattaaaaactaaaatgaattaaaattacagcctgtggtaaagtataaaaataaaagtgatgaaagaaggtgatcccatgccaaacaaaagtaaacccaatagattaatcgctgagaagtcaccgtacttactccaacatgctcataaccctgtggactggttcccttggggagaagaagcatttgacaaagcgaaaagcgagaacaagcctgtactcgtatctattgggtatagctagtttgggtatctatacgcacatgccactggtgccatgtcatggctcatgaaagcttcgaagatgaagaagttgcgaagcttctgaatgagaaattcgtctccattaaagtggaccgcgaggagcggcctgatgtggattcgatttatatgacgatctgccagatgatgacggggcagggcggctggccgctgaatgtgtttttaacccctgatcagaagccgttttatgcgggtacatattttccgaagacgagccgttttaaccgtccggggtttgttgaggtggtgaagcagctttccgataccttcgcgaaaaaccgggagcatgttgaagatattgccgaaaaagcggccaacaacctgagaatcaaagcgaaaagcgatgccggcgattcgctcggcgaagacatattgaggcggacgtatcagcagctgatcaacagctttgatgcggcgtacggcggtttcggcagcgcgccgaaatttccaatcccccatatgctgacatttctgcttcgctatcatcaatacagcggcgaggagaacgcgctgtacagcgtgatgaaaacgttggacagcatggcgaacggcggcatttacgaccatgtcggctacgggtttgcccgctattcgacagatgacgaatggcttgttccccactttgaaaaaatgctttacgataatgctttattgctgatcgcatatactgaagcctatcaaatcacgaaaaacgaacggtataaacagatttccgagcagatcatcacatttgtccgccgcgaaatgaccgatgagaaaggcgctttttattcagcgcttgatgccgacacggaaggcgtagagggcaaatattatgtgtggtcaaaagaagaagtccttgaaacgcttggagatgaacttggcgaattgtattgcgcggtctacaacatcacgcaagaagggaattttgaaggccataatattccaaacttgatctacaccaggctggaagacatcaaggatgaattcgcgctgacagatgaagagcttcagaacaagcttgaagaagcgagaacaaagctttttgaaaaacgtcaggaaagaacgtatcctcatgtcgacgataaagtgctgacttcttggaacgctctgatgatcgcgggtcttgccaaagcggcgaaagtctacaatgcgcccgaatacctggagatggcgcgagctgcagccgagtttatcgagaataaattgattcaagacggtcgcatcatggtccgctaccgtgacggcgaggtgaaaaataaaggatttatcgatgactacgccttcctgctgtgggcctacatcgaattgtatgaagcatcacttgatttaaccgatttgcgaaaagccaaaaagctcgaagcagacatgaaggggctgttctgggatgaagagcacggcggtttttattttacgggaagcgatgccgaggctttgatcgtgcgggataaagaagtatacgacggcgccctcccgtccggaaacggcgtcctggccgtgcagctgtcccggctgggcaggctgactggcgacttgtcgctccatgatcaagcggcaaaaatgtttgctgccttccatggagacgtctctgcttatccgagcggccatacaaactttctccaaggtttgctgagccaattcatgccgcaaaaggaaatcgttgtgctcggaaaacggaatgatccggacagacagaagatcgtaagcgctttgcagcaggccttccagccgaattatgccgtcctcgccgcagaatcgcctgacgatttcaaagggattgccgactttgcggccgaatacaaagcagtcgataacaaaacgactgtctatatttgtgaaaatttcgcctgcaggcagccgacgacgaatatagacgaagcgctcgatcagctggtttaaccggcggcaatcatgggaataacatttgcaaacacctaatcgaaaggggttatgaccatgaagcaaaagaatctgatctcaggtctcgccgttgtcgccggagtcaccgcatatatgctcaaagacgaaacaaacagacaaaaactgaaatcgtacttgcaaaacgtcaaagaaaagatcccttacttttcggaaaaacacaacgtagattcattcccggttgaaaaagcaggacacccgtctccgcatgatatcgaagataacaaaatggtatcggaaggatccatgtaccctgttcaatactacgacgaaaagaaaaaatagcgatgcatgagctgtcatatttatggcagcttttctgctgccgttctaaaaaactgcaagcggattatagatataaaaatccaaaaataaaagccgcccggtcggcagcctcttcaagccttatattttattttcataacaataatgattgacaagctcttcaattaaatcatgctctggaaactccccgtgaaactcaaagggaatctcctcgacaaaccggccgcgccggtatacatggatcgcaccgttttgtctggtcacgctgtattccggttcaaacgtgtatccgttccgctctattgcacccattgatcattcccgcctttcaaaacagcagttcatacacttcgtttaattctcttgtccgtttatggtcctgttcattcagcgcatatttcatctcatgttcaagcacttgattcagaaattccatttcccgctcctccaagtgctcgacaaactcttcctcattggcatatcgcccggaaacgatttttctgtaaatgttttgtcctatgccgtgttcaaggtgattcgacagtgactcacggaggtagcccaatgttgtgtccatgattcatactccttttttaccttttaggttgggtaattcttaatgattcatgcataagcggcctaaattttcaataagaaaaaggcgatacaccataatgctgtgcagataaaaactttctccttcccacatggtaagcgcctaaagccaaaaagactgaacacgcagcaataagaaagacggcttttcccccgtacaaggcaagcatcattccccccagccaaggccctaaaaactcaccgatgttgtataagttttgcatgccgtaatacgcgcccttcatatgatccggagccagctcgtccaaaaggacattcattgaaggaaaacataaaatttcgccgattgtcagaacaaacatcgaaagcataaaaacaatccagccatttgcgatagaaaaaccgatattccccaaaatgcaaaaaacggttccaattgatattgttgttaaggatttatacctctcaaataaacgggtgagcggcacttgtaaaaggatgaccgtcaccgcgtttaacgtgattaaagtcgaaaatattttaactccgtttgcaaagtcgttatttaaatactgcagcaaagtgctttccatttgcgaatagctgaacaaaaaaaggatgccgccggctatgtataatcgaagagccttgtcttgctttaacgtcttcaaaactgaacctgcctggactttttcaggagcgatttttgtctctttcaccgtggtcagccgaatcatcatcaagctcaaaagtatggcatagccaaaatagaccagccctgtgatgataaacggcgttccggttttggcaagaccaaaataagcgcccagtaaagggccgacagcagctccaacattgatggccaaataccgcaaagagaaaatgcggaatctcatctcccgttctgataactcagccatcaaagcctttgacacaggttcaaaacacgaatggcaaagcccgcttaaaatattcagcaataaaaaccacatgaaatcatgaacaagtccaaaaagaatgaatacaaagctccagatgaaaatggatgaaagcatcactttttttctgccgattttatctgaaagcgctcctccgactacccctcctacagtgcttgaaaaatagcctaaaccgatgacaagcccgatggttccaaaatcggctcccgttttcatatggagatagagcgccaaaaacggggttgtcatcgacttagccgccttcgtgacaagcgtgcctatcagcaaaaatcggatcaacggatgaaggcggctgaatgctttaaattgcgcaaacatccgaattcttttcccatacggtatgatcatggaaccacgttgcaagccggctgatacggcctctcaattcggcttctgtgcgtccgataattaaacagcttgcaattgcgtctacactggaagacgagccgtggaacctgtctccggcttgagcggatatattttgtttcgctatccagtctgcggctggcgcaggcttgatttctttcagcacgccgtctttcggcggaatcaacagccagccgcttaggcggtccggattgttgtccacctccggtatatgaaattccaggccgcattgcgctttaacacacacttcattgatatcaaaaccgaaagtctgcacagttgcttcacggaccatagcgccgccggttctactggccacttcacaaaacaccagttcatcatctggtgtatgaaacacttcagcatggaatgttgtggtattcggaacaggaagggcagcaagcgctttttgaacaaaatcagtcaaccgccgggtaagcggatttttcaattcaagctggaggctgcctaaaaactgatgatcttgaaacgctagacacccgttgatataacgcgacggccagctgaggacaatttcttcatcaaggatgaggccgtctatatgatacatatccccttcgataaacgactcaacttccagatgatcgggaagacctttcgcaagaacattccacacgtcctgccgattccttaaaacggttgtatcaacagaccccgatccgtaaataggcttaacgaccacaggaaaaccgaaagtttgaacaaacgtatataagtcggccgccgagtcgattttcttaaaatctggaaccttcacaccggcttttcttacttgctctttcattaatattttgttgcggaacagcagagcacttttgtaagactgcccttttatccccaaaagcgacctcagcttccccgccctcagcatatcaaattccgaggatgcaataatcgttttaaagtgatacgtttcattcagctccaaagcgcgcatttcgatgcatccattaaccggataatcgtcaaatgcttcgatcacatcataattcctgcattcatccgcacgatcggttgaggtcagcatcgccaccggttcatccagtcccttcagccatacatcatacggagacttgctataagctgttttatttaagataagcgtactcataacaatttctcctttcttgtaatacatgtttttcaactttataatagtaaaagtatttagataactctaatatatctttatctagtattaataacttttatttataaatagaggtgtgaaatatgaatctccatgcactgcgattgttctattcggtcgctgaaacaggcagtgtcactcaagccgctaaacagttaagtatcagccagcccgccgtcacctcgcaaattaagaaattagaacgcgagatcgactgcaccttattcgttcctaaaggcagagggatcctgctgacacagtccggcgcagagcttgcaaaacaggccaagcggctgttttcacttgaaaaagaaattgaatcgtacgtggagcagttaagggaagggtcaattggaaaactgcgtattgcctccaccttcctccccgccaattatttgctgccaagatggctcagccgatttaaacagcaatttccgaaaacggaagttgaaatcacgacaacgaattttcaaaaagcttgtgaacagctgatcaactacgaagcggacattggcctgatcggcgggacaacggaattcggccccttcttaaaaggaacgctgcttttggaagatgacatgttattcgtagtcaatcaaaaacataaattcgcctcaaaacacgtggcattagaggagattgtaaaagaacctttcgtctttcgcgaggaaggaagtttttcgcgggaaaaattgatttcgctgtgcaacctgcataacgcgggaaaaccaaatatgggtgtacaaataaacggattaaacgaaacaatcagaacggttatggaaggatacggtgcaacattcgtatccgctcttgaagtaaacgaatatatcgcccgcggagacatcgcaaaggttcatgttgataaagccgtaataaagaacccgatttcgctatgtgtaaggacggaagaccatctatctccatctgcccttaactttattcaaatgatcgattcgaccgatgaatatcctctataacggacgtcatctcaatttccattaaataggttctttacaaagctcgaccggctgtagaacgccgtaaactgccgggggttgtactgttgaatattattgagcgcatgtttggtgaggtgttttagtagtcaacagcagcagacgggccgtctcaatgtgtgaatcaatggtttttcaatttatgacaacaacacaaggagccagcagctattctcggggcggtgttcgcaaggacagctgcttccttcaatcgtcatgcgaagctccgtcttgtggccggaggcagactttcttctggatttagacctatatgtgggataaagccggatcccagcttaagaaactaacagcacactgtcctacgcctgatcctgcattatgaaatcatcacttataagatatacttgggctttttcgttatcttgcaaaggatatttttaaaaatgccaaaacttccgaataaaaagtggtatgatttttggtagaaaggacggctggtgcctgtggtcaaaaaacgggtcaatttttctctgcaaacaaaaattatgggcttgattgcagcactgcttatcttagtaatcggcttgctgacagtcacgtttgccgttcagcaaacaaaagaaggaagaaaacagtccgaacagcttgccgttcagactgcaaaaaccatttcttatatgcctccggtaaaagagctctttcaaaagaagcgcgggcataagggagaggcgcaagaggtcattgaacaaatgaaagaacagaccggtgcctatactatttatgtcctcaacgaaaagggagagatcaaagtcgcctcggaaaagagaggtcaaacgaagctgacaagaagcagaaagatcttgttcggcggctctcacatctctgaaacaaaaaacgatggccgcatggtgatcagaggaagtgcgccgattatccaggaacaaagtggttacagcaaggccatcggcagtgtgtctgttgattttctgttaaacgagacagaacaacgtattaaagagaatgtgagaaaattgagcttcatggctgttctcgttttgctcataggatttgcgggtgccgccgctcttgccaaaagcattagaaaagatacgcttggccttgaaccccaagagattgcatctctttaccgtgaacgaaatgcgatgctgcgtgcgattaaagaagggatcattgccaccaaccgtgaaggagtcgtcacaatgatgaacgtatcggcagcggaaatgcttaggcttcccgaacctgtggtcaaccggccaattgatgacatcctgcccggagccggaataatgtctgtccttcagcagcggcagatgttgctgaatcaggaggtctgcgtcaacgatcaagtgtttattttaaatacaaaaatgatgctccaaaacggtcaaacttacggaattgtcgtaagtttccgtcaaaaaaccgagttaaaaaggctcattgacacgctgacagaggtgcaaaaatactctgaagatctccgcgcgcaaacacatgaattctcaaataagctttatgtgatcctaggcctgcttgagctaggtgagtatgaagcagcgatcgacctgattaaagaggaatacgccattcaaaatgaacagcacgacattttattcaaaaacattcattctcagcaggtgcaggctatcctgttgggcaaaatgggaaaggcttcggagaaaaaagttaagttgtccattgatgaaaacagcacgcttgagccgcttcctgagcatatcgggatgtctcatctcattacgatcatcgggaatttaattgataacgctttcgaagccgtagctgagcaaaatgtgcggcttgtttcatttttcatcactgacatcggccgcgatattgtcatagaagtggctgacacaggatgcggcgtagcgcctgataagatgaaagccatctttgaacgaggatattcttcaaaggggatgaagagaggctacgggctggccaacgtaaaggaatctgtacgtgaacttggcggttggattgaagtggccaatcaaaaaggcggcggagcggtatttaccgtttttataccgaaggagaagcaaacacgagagggggaatccatttgattgatatcgtgatcgcggaggatgatttccgtgtagcgcaaattcatgaaagattgatcgaacagcttgatggattcaacattatcggtaaagcggccaatgccaaagaaacaatggaaattctcgaggtccgaaaggccgacttgctgctgttggatatttacatgccggatgagatgggcacaacattgattcctgtcattcgaaaccggtttccggaagtggatatcatgatcatcacagcagcaaccgaaacatgtcatttacaggaatcgctccgggcgggaattgtgcactatttgattaagcctgtgactgccgaaaaattcaaacaggtgctgcttcaatataagaaaaaaaggcaaacactgctttctcagccacaggtcagccaatcaatgattgaccaaatcttcggagacttctccagcggatcccgtcaggctgaggatttgccgacaggtatcaattcgattacactgcaaaaaatcagggatgttctgcgagacgcagctaaaggaatgacagccgaagaactcggtgaaaaaatgggggcttcacgtacaacagcccgccgctatgccgaatatctcgtgtcaaaagaagaagcgcgcgctgagctggaatacggaattatcggcagaccggagagaaaatactatttggcggatgaataaacatgaagaactttgcgattataatgatttgtctattgatcttaatgtcgggggatgaaagacaatcgtccgccccgcgtcccccgggagggccggttgaaatcgtcgtacccgctgagccttcgggcggctgggatttaacggctcaggcgatacaatccgtccttaaacaaaaacaagtgataaaaagcgaagtgaagatcgtctataaacccggaagcggcggtgacaaaggctggaagtatataaatagcagcgatacgtacaccatcggcatgacatccagcttaatgctgagcaattacattctcggacagagcaaactgaaaacagacgatttcaccccgctggcgattcttgcaaaagaatggcagacgatcgctcttccaaaaggatcggaaataaagagcggaaaggatttgctgaatgagatcaaaaagaaccccggcaaggtaaaaatcggtttttcccccggacttggcaatgatgaccagctgtcattcgtcagggcggccgatatgtacggagttgacccttttaacattcaatatttacagtatgaaagcagcgaagagctcattcaggcgcttatcagacatgaaattgacgccgcatcgatgactctatcagaagctaaaacatatgaaagaagcggcagcatcacacttggggctgttacttcagacaaaaggcttcccgcatatccgcatgtaccgacgtggagagagcagggcatcccgtttgtattttcccattggagaggtgtattaggcccgaaaaatatgaccaaagaagaaatttcctactgggatcaagtgtttaaaaagatcacatcctcaccggaatggaagcagaaaataaatgaacaggaatgggaaagctattatttaaacagcaaggagacgcaacgattccttgaggagcaatcagcattttatcaaaacatcatggctggggattaaccgggtatttcgcgtctgcggaatactttttttatgtatttaaaaatggtcaaaaagaacaaaatgattttaaaaaattaaaaatacataaaaaccaaattatttacttcagaaagttcttctcatatgatgacaaaaaggcaaggcttagggggaacaggagagaaaaaaatgtaagcggattcatatgaggggggaataactgtgttagcaattttaggttttttcatgatgcttgtgtttatggtattgatcatgacaaaacggctttctgttctgacggcattagtcttgacaccgatagtgtttgcgctgatcgccggattcggattcagcgatgtcggcgacatgatgatttcggggattcagcaagtcgcgccaaccgccgttatgattatgtttgcaattttatatttcgggattatgattgatactggcctgtttgacccaatggtcacaaaaatattaaaaatggtcaaaggcgatccgttaaaaatcgtcgtcggcactgcggtgctcacgatgctggtcgcattggacggagacggatcaacaacatatatgattacaacgagcgcgatgctcccgctctatttgctgcttggcatccgcccgattatattagcgggaatcgcaggagtcggcatggggattatgaatacgattccatggggaggcgcaacaccgcgggcagcgagtgcgctcggggttgacccggctgaattgaccggcccgatgatacctgtcatcgtaagcggcatgctttgtatgatcggagttgcgtatatgctcggaaaagcggagcgaaaacgcctcggcgtgattgaactcaaacatccggctggtgccaatgaaacggccgccgctgcggaggatgagtggaagcgtccgaagctttggtggttcaacttattgttgacgctttcattgatagggcttctcatatcaggaaaagtaagcttgaccgttctgtttattatcgcgttctgcatcgcattgattgtcaattatccaaacctcgatcatcagagacagcgaatttcggcgcattcgagcaatgtattggctatcggttcaatgatatttgccgcaggggtctttaccggaatactaacaggcacaaaaatggtagatgaaatggcgatttcgcttgcgtctatgattcctgaacaaatgggcggctttattccgatgatagtagccttaacaagcggcattttcacttttctgatgccgaatgacgcttatttttacggagtgctcccgattttatcagaaaccgctgtcgcatacggtgttaataaggtcgaaattgcaagagcctccatcatcggccagccgattcacatgctgagcccgcttgtgccttcaacacatttgcttgttgggcttgtcggggtttccatcgacgatcatcaaaaatttgcgataaagtgggcggtgctcgctgtcatcgtgatgacaggatgcgcgcttctcatcggatccatatcaatttattgatggtgttgatcgcttcaatgcccttatgagggcgatacacgtatcgcagcataccttttcacatagcggcctttttaagcttgcagagacactcctgttttctgcgggctttttcttttggataaaaaagacctcccttataccttttcataagcctttactgtgtggcttggcttcacttgaaacacaacatctttcggacccgttgtttgaaatggaccccagaggctctccggagcgggcgggtttccgcccatcattggcgcccgtattgaaacacagccaagcttataaaaaaaagaaccaggagctggttcttgatcatagcgcctgagagggctgccaataacatctcgacagccccaagcgccttaaaaatttcattatttattcccatcagctgaggcacgcttgccaattccaaacacataatagctggcggcaacaaccgcaaggaaaataaccccgacaatcagagacacgcgtgtgtcattgttgaaccacatgcccaccaataccataagaaggaaaccaatcgtcaaatagttcgtcactggggcgaaaggcattttgaacggatgtttgtcaatttcagctccttttgcttttctgaatccgatatggctgagcagaatgacaaaccacggaatcatccccgggagcacgctcgcactgtatacatacacaaaaatattaggcggcgcaatataatttaaaacgacgccgattgccaaaccgatcaagacggcaatcgtcccgtataacggcacgccatttctggaaatcttcgtaaagaattttggcgcttggccgtttactcccaatgtataaagcatgcggcccgcactgaaaattccgctgttgcagccggacattgccgccgtcatgacgacgaagttaataatgccggctgccgccgtaattccgactttcgcaaaagtggatacaaacggactaccgattgcattcagctcatcccaaggatagactgtgacaatcacgaagatggcgccaatatagaaaattaaaatacgccaaataatactttggatcgcgtgtctcagcgtgttttgcggatcttttgcctcccccgccgtaattcctatcagttcgaccccttgataagcggcgatgaccagcgacagcgcaaagaagaatcctgagaatccgcctgtaaagaaaccgccgtgcgaccaaaggtttgaaaacccgatcgcttgtccgccgttgccgaatccgaagaaaataatcccgaaccccgctgcaatcattaatacaatcgtaacgattttaatcatcgcaaaccaaaattcaaactcaccaaatgatttaacagagacaaggtttgctcctccgagaatcgccattgcgataatgcccggtatccaagcgggaagatccggaaaccagtacttcatgtactccccgacggcgatgatctcggacatcccgacaatcacccactgaaaccagttgctccacgcggtcatatatccggccaacgggtgtatatattgatggccgaatgtcgcaaatgaaccggtgcttggctctacatatagcatttcccccattgcacgcataataaaaaagataaaaattccgcaaatggcataagcaagcaggacggaaggtcctgtccactttatcgtgctggaagatcccataaataaaccgacgccgatagtgccgccaagcgcaatcatttggatgtggcgcgcgcccaggcctctcttcaattctttgttcgccacttcttttcctcctcttacacggctgatgtcacccaaaaaactatatgatgacaaagcatcttcatcgtattaagtagtaataaaaatctgataattacaattagtatatatctcaaaatttacttattccatcataataaactccttccaaaaatacaattgttttttccaggagaacaaattttactctatctatttattaagaaacaactatcccaatataaagaatattcttataatatcaaaaagcagtacgcatcttgaataaccaatcaaaatgcgcccgtttttccttataaacaatggccggcggccgattctttttcaatgtttaaaatataatacaactcatcaagtttttgtatttgataggttggtacaataccagtgtcatttgctatcatgcccggattcatccagcatgtatccaatccggccagccgccccccttctatgtccgctgtcaatgaatccccgatgatcagcccctgatcgacagaaaaatgaggaatccgttcaaaaacgtaatcaaagtattctttcatcggcttttgaaaaccggtgtcttctgaaacaaaaatccctttaaacatcgggtacaatcctgaagcttgcaggcgcttatactgcgtttttgaaacaccgttcgtcacgatatataaatcatattgatcccgcaggcttttgattaattcaaaagcgccgtctatcagctgatgcccttcttcaaggaagctgcgatacttcttctcaagcaaaacgccgtcagcctcaagaccatattctttgaataaaagggaaaagcgtgtgttcaccacttggtcgcggtccatctcccctttttcgaacaccctccataaaccttgattgattcgtttataattcgcttctatttcagctgtcaaacgaatttgctgctcctcaaaaagcattcgcaatgctgacttttctgccgcaccgaagtctaatagtgtatcatccacatcaaaaaataaagtacgataatttttcacgagtgttcctccgtttagcattttagtagccggtcttgctgtcttttatggcttcaagctcgtttttcagcaagctcatcgtctctgccttttctttctctgcctgaatgtcaaacgccagctgctctgtaaactcccatatgtcctccagtcttcgcctgatctgataaaaccgcaaagcgttctgatcgatttcaaatcctttatgagtctcgcagtaaacgcgcaaaaactcttgagcatacggctggttagcaaagaacatcagatccgcttcaacaggggccagtttcaagccctcccaatcgatcagaatcaattccccgcccgttttcatcaaattccagccatgaacatctgtatggcacaaagccaatcttctgccgctgcatttcaaatcatccgccagggataaggctgactccatcatatcgcggattgctccgctgtagggttgaatgagtgtcgccagctcacaaggcaggtgatcaagccattgtgtcatctcatctaaaaacgaaatatcatatttttctttaattccttctgtcttcaccgggatcgtctcatcatatcggtgcagctccgctatgattccggcgagcttctccacgcaccctttgccgagcggctgatctccaatggtttcaccggcaatgtattcataaagcatatacaccgcatcgtcatcttcacacttgtattctccagctgttgtcaaaagcggcacaggcagcctcccgttgagagcggtgtgatcccccagccaccccagaacagggatgtaattatcgattaaagctgcccatttcgctgtcgatgccctatttttatcatacacttttaaaaagaaagccgcttcaccgtcggttacttgataagcaagtgctgtccacccgccttgctcgggagaaatgttcacactgtcgattccataatggttctgcagcatttttttaatactgaacattccgttcacctccgcaaaaaacgcactcccggctcacctgccgggagtgcggccatcatttgattagtcaatttcctttgcatcaggtttcagctgctgaacgcgcctcagatactgtctgactttctccgcttctgcgaaaaggtattgttcattcagatgttcagcaactgctgctgctgtctcttcaaacagctcccacatcttaaacaaactgttccatacccgcttataatcagctggcggatacgtctccaaaagcctttcccacgtattttgatcaacatagcgatccaaaaattttgcatttttacctatgctcagcgaaaagcccgtttcaaagccgaccttccattcgagcattttcaacagcatggccctgacgagatttaaatgatcgagtgcataaagaatttcctgccgccacaagcctttggccacatatgtcgatgtccaccaaaattcattgcagcagtcggcgaagcattgcggggacggtttttgcacccaatattcccgatccgtcggcggcgggatgacgggcagatcctgatccttatccaacaggatcacggtcaagccgtcttccctgctatattccagcttttcttcaagcggcacaagaatcaaatcaatgcggctgccgtctgtaaataacatcaaatacgaaaagcggttgccaagctcattcggaaacagctccatcgcttccggcgtctgcatgatgatccgctctccaaaaacgtccacccagcccggctcatcgagaaaagactgcatatctgttacaacatagacaatatcataatcgcgaaaagggtccttcgggacgtttgggttcgtccgcgagccgttcatgccgaccgctctgacacggctgtcctcccgtgcgaccttcagcaccaaatcgatgatttcctgctctgtacgcatgtatatacctcctctttttgattgttgtagtaaatcttgatgaggaggtccgcgaatacacggttatatgaaatgctctaaaaacgtcatcgacatgtcctccttcttttagcgaatggctttcaggtagtcttcaaggcgctccagctgtgaagaaaagccttcgaccatccccttatccagcagctgttgaagctctttcggagaagaaaaatgtgagcgtgtaatcagttttgtccccacgtcgcgctcttgaaaataaacctcattcaaaatctccggcatgccgggaacaacattcccttcctcgtctgtaaacatatccgtgtacacgatcttttccggcgccgcaatctcttgaaaaacagccttgccgcaagatttccggccatagaattcgccttggttttgatctctgcattccatacagtaaagccatacgccatccggctgaaactcaaacctgctgttggcagtctgccatcctttcggcccccaccagctttccaaatgcactgacccagaaaaagccttaaacaccagctcccgtggcgcctcgaaactccgctccatgaccagagttttcccttccgctttcgcttgaacgctgtgtaccgctttgtgatcggacatcttgattcctccttgattggatatctaaatgaaacggcgaaaaaaaccgtgaaaaccctgtgccaacaagtgttttatttgcgaatcttgaccagctgccgctcctcgaaataaaacaggccggcaatttcatcgatgtatttctttttatccagcttgacatgcttgcccagctgaaggttctctatatcaatgaaaaagtctaagcggtcgtctttttctttgtcttcctcaccgtcccagcaagagtaaacttctatatcttcaccctcgggaatatttgaattgatatagctgaatagcgcccttatgtcatttccgggtctatgtaaacagccggttgcctcatatacaaacggcttgctgagttttgttttgaccatttcgtatcctggatcaagcttaacgatgctaatcaaaccttcttctgtttggtctcggaagctccccagcggaagctcccgatcggctgcaataaaatgatgaagtgtcaactgtcttccctcttctttcctttataaaaaagaaccctattaaagggttcttcaaatcgctcatttttcctgcttagcagttgtttccgtcaagatcgcactgcaagccgtcaacaggtttttgtctgctttctttttcgatcgcctgttcaaacacttccttcgccgcggctccggcaatccgctcattgccgatgataaaagtcggaacggccgtgatgccggcttcttcgtaagcgtgttggagcgccttccgctgcacgtcctgatatgttcttgcgcttaaagcttctttaaaagcatgttcatccagtccggcttctttggccagcgacgttaatacgtcgatgtcgccgatatcctgctcttcctgaaaaaacgctttgtaaacccggtcattgtacgctttccctttaccgtgttcttttgcgaagtgatagccttcatgagccagatctgtataaggatgcggagagacgttcggcagcttcatattgacgccccaagcctcgattcgcggcttaatggcgccgtcccacatcgccaatttggccgggtcgtttaacggatcaagctgctccgatgggcgcggcctcagttcgaatggcagccactcgacttccacatctttgccttcgatcgctttttcgagctggtcttttccgagaaaacagaatggacagacataatcggaatatactttaatatttattgtcatgtttttcttcctttcttgtcacccaatcaactatatgtaacaataatagttacaattatgtcatctgtcaaacttttagtatggagttaaaatcggcaatgatcgggaactttcagctgtttatatcgtattatgatgcgttacagcttgcgccatcaacttctttgacattatatcgataaggagtttattaaatgaaaacagaaaacaacaatagcatgaaaccgtttttctcaatgattctcacatccggcgtacccaggctggctttaagcgccggtttgaccgcaagcctcgtcacgactttggtcggcttgtccattccgctgttgacaagggaaatggttgacggcttttccgccaattcgatcaatctggccttagcgggaatccttgcgctcgtttttatcgttcaagcggtctgcgacgggttttcgacctattttctttcttacgccgggcagaaagtggtcgcttccctgcgggagcgcatgtggttcaagctgctgcgccttcctgtccgctactttgacgaaaagacgagcggcgaaaccgtcagccgagttgtcaatgataccggcattgttgaaagcttgatttccgaccattttccgcagtttgtttccggaatcatcaccattgtcggatctgtggtcattctgctgatcatggattggaaaatgacgcttcttatgctgatctccgttccgatcacgaccttcatcatgatcccgctcggcatgaaaatgcagcgcatttccaaaacaatgcaggatgaaacagcttccttcaccggacatgtccagcagacattaagcgaaatcagattgatgaaagcatcaaacgccgagcatacagaaaaaatgaaagggttatcaggcatttcaaagctctttcaatacggcctcaaggaagctcggatattcgcgcttgtctccccgttcatgcaccttgtcattatgattgtgatcgtcgccatcatcggctacggcggcatccgcgtctctgaagggacgatgtcggcaggctcgctgatcgcctttttgctttatctgtttcaaatcattttcccgatcacatcgttcacaatgtttttcactcagctgcaaaaagcaaaaggggcaacagagcggatcatcgagattatgcattctgaagaggaagaaggccaggaagggcttgagatggacatctccaatctgccgatacatgtcgagaatgtaactttcacttacgccggtggcgagccggtcttacgcggggtatctttcgacgtcgatcccgggcagatgattgcgtttgtcggtccgagcggcggcggaaaaaccacgatgttcggcctcttggaacgattttacgagccggactcaggagccattaacatcggggaaacaccgatcagcaagctgtcgatgaaatcgtggcgcagccagatcggctacgtatctcaagacagcccgatgatgtccggcaccatccgtgagaacttatgctacggcttagatcacgccgacagcattgatgatcaagaactgtggaaagtcgcggaaatggcgtatgccgatacatttattaaacaattccctgagcagcttgatacagaagtcggcgaacgcggcgtcaagctgtccggcggacagagacagcggatcgccatcgcccgcgccttcctgcgcgacccgaaaattttaatgatggacgaagcgacggccagtctcgacagccaatcagaagccatcgtccagcaggcgcttgcccgcctcatggaaggccgcaccaccttcgtcatcgcccaccggctatcgacaatcgtgaacgcggaccaaattatgtttatcgaaaaaggcgagattacagggcggggacggcaccatgagctgattgcttcgcatgcgctgtatcgggagtttgctgagcggcagttgacgtgatcttttataaaaggaggaggtcattcacatgaactttcaactcgaggaagccatcgaaatcctggagcgcacaccacaaacattgagtcagctgctgaccggattatcaaacccctggatcagctgcgatgaaggcgaagacacttggaacgcctttgatgtagtcggccatctgattgagggagaaaaaaacaactggttgccccgaatcaaaatgatcgtgacaaaaggagcaacggaaacttttccgccgttcgaccgcttcagccagttgaatcaaaacgacgggaaaacgattgaacagctgcttaacgaatttgctgaaatcagacgggcgaatctgaaaacattgcggcagattcttgatcctgaaaccgacttcgaacaaacggggatgcacccggagtttggaatcgtcaagcttagagaacagatctcaacttgggttgcccacgatctcactcacctctcgcaaatcgcaagagtgctggcgaagcggtatcagatgatgtcggaccttggaaagcttatttgcggattttagctgagtaaaaaaacatccgctcgttttacagcgagcggatgctagatttttcggctcagcgctgcctgtcaggctcaaaaaagcaggtaagatatgacgaatgaaacccttgaatcttcaacaccaatcaaggctattatgaactgatttctcttacatgtgctgctttccgtgaactgaaggtcgtcaaaacaacaacaatcgcaatcataacccccaatgccccaaaccacgtaatagaagccagcgacactttttctacaaaaatccctccgattcctgcacctgcggccatggcgaattgcatcatcgattgattgatgccgagcaatacacctgacaattcgggttcaagcgtcgctaagtgatattgctgcgtcgggccggtagaccatgcggcgaacgaccataatatgagaatcaacagtactccgacataggaatgggtgacaagcgacagcaaaatcagtgcgatgatatgcagcgccatcccgccaacgagcgtaaaaggaactccccatttatcagtgctatatccgccaaacttcgatccaaccaagctggcgattccaaatataagcaaaacgccgctgagcaaattgccgctgatccctgaaacggtcagaaggtaaggagacagataagtatatgcaacggaatatcctccgagccagaaaaaagtgaccgataaccccatcgctactttccgtttctttaaaagggaaagctgctgaagcaaagggacgggcttatcgccttcagtatgcggcaatgttaagaatagaacaatcattgcgatgaatcccaataaagcaattcccccaaatacagacttccaccctaatgcttctgccgtcattcttccgagtggaacacctataatcaaagaagcggtaaaccccatgacgactgtagcaattgcactgccctgcttacccgccggtgcgatcttggcggcaatcgttaaggccgtgaccacaaccatgcctgcccccaaagccataacgacacgcgctgcaacaaaccaaccataaccaggcagggtaaaagccaaaatatttcctatcacaaacaaaccgagagcatacatcattaacttgcgcctatccatacttgccgtcaacgccatcaggaccggggtgaaaacagcatacaccagtgaaaagatcgtaatgagctgccccgctgcagctaaagttatcccgagtgtgtgggcgatctgatccaaaataccggaaatgatgtactctgaggtccctaccaaaaaactgatgattgctaaaagataaattttccatgtactaaacattatcgttcgctcctttatcacattatacatttacatatcacgaaataacgatatgtaaaattaaaaaataaacacatcggaatatgtcgatatgtatggtgtaaaaataaacatcatcaagagatgtttattttttaatgctcatcatatctctgttttaagaaagtcagcaagctttccaatggcctcttcgtctcttttgtagtacgtatactttccgattcgctccgccttaatcaggccggctcttaaaaggatcgcgagatattgggaagccgtcgattgcgtcattttcaatttgtccgtgatttggctgacacacaccccgattgtgttcatatcaatcccttcatggggcttaaaatgacgatcaggctccttcagccattgcaaaatttgcagccttgattcatttgataaagctttgaaaatttcaataggttccataccaatcattatatcttcatatcgcaaattgtaaatatgtgttgtgcccttttattcttaacatcaaattctggctgacaattcactccccaaagaataaaaaaatcgttgccattcaagcaatctttgtgtatattgtacatattgtgtatattgtatataaacaaaagagggtttaaaatgaaaattataatttcgaatagttcaaagcaacccatttatgaacaaatttacacccaaattaaggatcaaattcttgcgaatgaattgaaacccggacagccgctgccttctatgcgccaattggcaaaggacatgaatgtcagtcttattacgtcaaagcgcgcttatgaagaactggagaagaatgggttcatttattccgtagtcgggaaaggctcttttgtatcagatcagaatgacgaaatgatgaaagaaggaaaaatgaaagccattgaagagcaattgtcggcagcgataaaaaacagcaaagacataggcgttacccttacagaattaaaagacttgcttaccattttatatcaggaggaagaatgatggacaatgtaattgaactccggcatgttcataaatcgttcgatggtttccagctcaaggacttttcgatgaatgttaaaaaaggttttatcaccggatttatcggcggaaatggcgtgggaaaatcgacaacgattaaactgatcatgaacttattgcagcctgacagcggaacaattacggtatttggcatgaattacaaggagcatgagaaagaaatcaaacaacgtattggctttgtatttgattccaacatattttatgaacatttaacgttagctgaaatgaaagatattgtgaaaagatcctatgtcaattgggatgaacaagtatttaatgattatgtgaacacatttaacttgccgctcacaaaaaaaatcaagacgttctcaaaagggatgataatgaaagcatcattaaccgttgctttgtcccatcatgcggaattaattattatggatgaaccgacgtccggactcgacccgattttccgccgggagctgttggaaatcttgcatcagctcatgcaagatggggataagacgatctttttttcgactcatattacaactgatttagataagattgcagattatatcacgttcattgataaaggagagcacatctttacaaaggacttttacgaaattgaggaacaatatgcaattgtaaaaggcggaatggagttgttagaccgggaaaccgaacaggaatttatagcggttcgaaaatcaactcatggatttgaagcattgactgcgaataaatcacgaacagaaaaaatctttggggacatggcgttaatagaaaaaccgacccttgaagatattatgttctatacgaagaaaggagccaaagaacatgttcaacttaattcttaaagatattatcttgcagaaaaaaacattggcggcttcgtttttggtattatgtgtttatttaatgttagatatttctccaatctgggttggggttgtatttagtatagttatatcgatgtatgccttttcaatagatgaaaagtcttctatacatatgcttctcaattctttgccttatacacggaaagagattgtcagttcaaagtatattgtcgtcgttctctttacatctatggtggctgcagccatatttatcgtacacttcatcattcaccgggaatttacgatctggaaagacatcttgctaatggttgccattgtgatgacagctgcttcattcatgctgccattctgttataaattcaaaagcaactatctcgtgattgcttctattgctgcatttggcttatatatgctaacgattaactttttcgtccaaaatttgaacgatcaaattagagagttcattcacatgcttctaaccttacaaaatacttttctctatctgatcgttgccatatcaattattacgctgtatgggtgttcatggcttctgtcgattcggatttatagaaataaagtgttttaaataggatagggcttttttccatcattgacaccgcttcatattcatcctcggataaaaaactgcaccgtcacactcctagtcaggttgttacggtgcagcgtttgatggggatgatgaagaccaaggccgtctttcaatcgcctattcttccagttcaataaacgagtatttctctggatcggccaatacataaaaaagtccgaagaacatcttccacccacgaaccggacttccgcatctaaactttaacacttctccttcatctaaagtaaacctcaaagcttggcttacacaccaatcaattttcacttggatctcatgttcgccaggctccaaatcaattcgcagtctcccgccatctttgatttttccagcctcgacaccatcaatcagcactgtaaattttctcattttattcataagctgcgatgttctgttaacttcaatgtacgtttcattgttcatggttacacttccttaaaagataagtatatatacgagcatcgtccaaaccgccccggcattccgctgtgcgcttcacttacaatctagcgcacttcgatttttgataagacttattcctctttcaaacataaaaatacccctccagatcatccaatccaagaggggtacaaacttttatttcaaccgactcctactccaccgtcacactcttcgccaggttccgcggcttatcaacgtcacagccgcggtgcagcgctgcgtagtatgcgatcagctgcagcgggatgacggagacgagcggtgcgagctccggatgcacttcaggcaggacgaagcggtcgtctgcttcttccaggcctttcagggagatcacgcaagggttggcgccgcgggctgtcacttctttgacgtttccgcggatgcttaagttgacgtgctcctgtgtcgcaagggcgatgaccggtgtgccgtcttcgatcaatgcgatcgtaccgtgcttcaattcgccgccggcgaagccttcagcttgaatgtaagaaatctctttcagcttcagggatccttcgaggcagacgaaatagtcgaggccgcggccgatgaaaaatgcattgcgtgttacggtcaagtattcacgggcgatcatttccatttcgtctttttggtcgcaaagggcttccattgcgtttccgataatgccgagctctttgacaagatcaaagccgagttctttgccgcggctttccgcagtcacggctgccaaaattgcgagaacggcgatttgcgccgtatatgcttttgttgacgctaccgcgatttcagggccggcattcagtaaaagcgtatagtccgcttcacgggaaagcgtggatcccggtacgttggtcaatgtcagcgctttgtgtccgagctttttcacctgtacgagaaccgcgcggctgtcagccgtttctccgctttgagaaataaagataaacagcggcttctcagaaagcaatggcatattgtaagagaattcgcttgcgacatggacttcagccggaactttcgcccatgtttcaataaattgcttgccgacaagacctgcatggtagctagttccgcaggcgatgatatagacgcggtcggcttcagcaacagcgtttgaaatgtctccaggaatggagagcttgccgttttcatcttggtacgtctgaatgattttccgcatgacaagcggctgttcatcgatttcttttaacatgtagtgagggtatgtgcctttttcgatatcgctcgcatcaagctctgcaatatatgaggcacgtgacatcaattctccgtcgaggtttttgatcacgacttttttgtctgtgacaatcaccatttctttatccataagctccacgtattcgtttgtcacttgaagcatcgccatcgcatcagacgcgacaacattgaaattgtctccaaggccgacaagaagcgggcttttatttttcgcaacatagattgtttctttgttttcatgatcgaataatgcaatcgcataagagcctttgagcagcatgagcgtttggcggaacgcttcttctgtgtcaaggccgttattgacgaattgctcaatcacttgaacgacaacctctgtatccgtatcgcttttaagggttacatcgtgtaaatattcgcgcgtcagttgaacatagttttcgatgacgccgttatgaacaagtgtaaaacggcctgatgcgctttgatgcggatgagcgtttagacggctcggttctccgtgagtcgcccagcgcgtgtgtccgattcccgcttgtgacttcacgtttgcatcaacggctgcgcgaagatcggcgatccgtcctttttctttaaacacgtgtacgccgtcttcgttcgctacagcgattccagctgaatcgtagccgcgatactccagcttctccaaacctttaagtaaaatttcctttgcatcaagctggccaatataacctacaataccacacataattttcttcctcctaaagtcgcaggcaggagacgaagaaagtctgcttgtcaggcggggactttcaatcgtcccctcctacatgttttttatggaagatcatgcaatttccctttgttcaaagagtcgcctctttggtttgaggaaatccttgcggctgtgatctttgaggtcagccgggaggcatccgccgaaaattcgataaacctccatcctcgtcaactaagctgtttcatccgtacgcttagtccgggcgctataactataaaaatttttctgccctgcctttccttataaattaaacaagacaagctgattttactatacgctaaaggaaccgtcaaacatttttcaaaatggttcacattttttccaagattgaacggttccctttatcttatgtgaaatcagcatgtctcgttcttcagtcttctgcggaaaattactctgctcccatttcagctttcacgacatctgcaatgcggcctacgtacttctcgcaaagctccttcgttttcgcttcagccatgacacggacaagcggctcggtgccggatgggcgcacaaggatgcggccgtcaccgttcatttccttctcaacttcttcgatgaccgcttttaccttttcgttttccgttactttatgtttatcggttactttcacattcaagaggagctgcggaaacttctgcatctctgccgcaagctcagacagcggcttgcctgtcattttaatcgtgttcatcagcatgatcgcagaaagcagtccgtcgcctgtcgtattgtaatcaaggaaaatcaggtgtcccgactgttctccgccgagggtaaatccgccctttttcatcgcctccactacatagcggtcgccgaccgctgtctgaacgcttttaatgccttccgcttcaagcgctttgtagaaaccgaggttgctcatcaccgtggagacaacggtattgtccgtcaggcgcccctcgctcttcaagtacttcgcgcatatgtacatgatttgatcgccgtctacgatattccctttttcgtcgacagcgattaagcggtcgccatccccgtcaaacgccatgccgacgtcagctcccttttccttcacaaattctgccagggcttcagggtgggttgatccgactccgtcattgatgtttaatccgttcggagaagtccccatcgtcgatacatctgcgtcaagatcggcaaacaggtgggtcgccagcgaagatgtcgccccgtgcgcacagtcaagcgcgacatgaatgcctgtgaagtcttcatcagcagactgcttaagaaactgcaaatatttctgtccgccttcaaagtagtcgttcaccatgcccagatcagcgcctacaggccttggcaggtgatcttccggctgatccatcagacgctcgatttcaagctcctgttcatcggaaagcttaaagccgtcgccgccgaaaaacttaattccgttgtcctggacagggttgtgggaagcggaaatcatcacacccgcctccgcgtccatagccttcgtcaaatatgcgactccgggcgtcgaaatcacgccgagacgcatgacttctgctcctatcgaaagaaggcctgctacaagggccccttccagcatatgccctgaaatgcgcgtgtcacggccgatcagaaccttgggacgctccttatcttttgttaggacatatccgccaaagcgtccgactttaaaggccagctcaggtgtaagttcactgtttgccacgcctcttacaccgtctgtaccaaaatacttgcccattaatatcgctcctttttgattcatgaaggttgtgaatccttttcagaatgattctcttcttcttcatcctgaccattgtttttttcgttttgggttgtttgagatgagattttcactcgaatgctttgccgcggcagcgaccatgtcatgttctgcggaccgtttacttccagctttacattgtgctcgccgtcatcgagatccgccacattgacatagagctcgacgtcggaaggctggagtttttcgatcgcggctgtcgagccctttgccgtgatatccagcttgcctgacttcggatcgagaaattcaagatcccggctgtcattcagccccgcggttttaattgaaacttttttcagttttttctcttcttccttgtcaactttcaccttgattttcactttttcgggtgacacctttttagcgccgtccggcactttaatgccggcttccaattcagtatcatcctttattttacttaaatcaatctcgtcggcctcgacaaattctaacgaatcaagaacattttgcggcccgtagacggtcacctctcccggacttatatcgaggctggaaatgctgatgccgtccggaaggctgcctttccggtcaactttgaccggaatctttttgctcgggctcgtcaccggaacggtgattttaacgacggaagggctgacttcaaccggcaggacatttccgtccttgtcgtatactgtaagcttggcttctttttcaaccgtctggtcgacgccctctaaattgatcgtcgccttgatgttctggattctgtcgatcacggcttttgagccggtgacgctgacgtttttcgggttgatgatcggcagctccggcgtgtagccgtctttcattttgtttttattataaaaatcaacctcgaccgggaattccttcgtcgttttttcttcgatcgtcacggttgtcaccgatggattgatggtcagagtgaggccgtcggcaacatttctggccttcagctcgactttatgcctgcctgttttcaggttttgcatgtcggcataaatctcaaaatccttcacttgtctgaccttcttgacggttccggtcgggcctttaatcgtgacattcaccgtctgcggcacgcctgttacgacgtagttttcatcatcataaaacgatttgaccggtatatcggtgagcgtcgcttcgtctgttgtcgatgtcgggaaaaacgattcacctggtttcttcggagtcggcgcctgagcgctgtggaccgcaaagtaaagaagaaacgcgaacaataacgcgacaactttgacagcccagggattgtttaagaacttatccatttttcttcgccctccaataccagcgatttgaggaagtttcccgcgaatttttcttaaattccgcttcaagcatatttttcaatgcctcttccgataaatcacggtgaaggtctccgtttttggcgacgctgatgccgcccgtctcttcggatacaacaaccgtcagactgtcggtcacttcactgattcccactgctgctctgtgcctcgttccaagctcttttgaaataaaagggctttcagaaagcggaaggtagcaggcagctgcagcaacctcatcgtttttcataatcacggctccgtcatgaagcggagtgttcggaataaagatgttgatcaatagctcagagctgacctttgcattcaaagggatccccgtttctatgtaatcgcccattcccgtctcccgttcaattgtcagaagcgcgccaatccggcgtttcgccatatatttaatcgcttttgtaatcgcatcaatcgttttctgctgctgctcttcctcaggtgttccgctcctcgaaaaaaagcgcccccgccccagctgttccagcgctctcctcaattcaggctggaagatgataataatcgccaggaacccccatgtgatcgcctggtcaaccagccactgcagggtgcttaatcctaaatattgactggccagcctgacgagaacaatgaccacgattccctttaaaagctgaaccgcctttgtcccgcggatgaccatcattaatttatatattacgtaccaaacaaggagaatatcaacggcatcgccgaggtactgcaagaaagggatatcctcaaaagccatttcctcgtcctccaagaattcagtcattagtaaggttaatatgtttcaaaatggtatgatctattatttttatatatacaggggctattatagcacaaattgattttccaagtgaaatggcggcccctcataaaaaagagcaaagctcattcgcccgctttgctctactctttagactccttcacaccaaaaaccgattttccggtcgatttgatcttataccagatccagtcgaacacctcgttgatctcatggatctgaccggtgacttgtcctgctgaagccgtatatttttcaccgtttacaatcgtgacatcgccgtcgactttgccctctataatcagctttccgtttttcacggtcacatcgcctttgacaacttcgccttcaggcacgatgaccgtgttgtttttcaccacaagattaggctggctggatacgctgaaatcgtgatcgtttttccagctggagaaaaagctgccgcccatcaaaattgcaaataaagccgccgccactaaaaacggatgggctttaagccacctgttgatcgatgccgtccgcttttctttcggcagattcgccagcacattggctgtaaagttcgccggagctgtaagatgcgacgtgctctggacaagagcgatggatttttccatttcatgaaggtgctttttgcagccttcgcatgattggaggtgctcttttaaacgcgtttcatcttccggaagtatgtctccgtcaaggtatttatgcataagctgaacaatatgctccggacagctcatttcatcaccccacttaaagatcccttaattgttttctgagagcctctctgcccctgtgtatcctcgttttcaccgtacctacgggaatattgaggatttcactgatctcaatgagtgaaagctcatcaatgtactttaatacgatgaccgtcctgtatttatcgggaagccttaagattttttcctggatggtgctgtgcagctccaaagaaaccacttcatcctctggaagcgcaacatccgccgcaacctgggaatacattgtcagtccttcagtccctgccacctctgcatccaagtaatagtccggcttttttttacggatacgatcgatggtcaaattggttgcgattcgataaagccatgtggaaaatttccggttgatatcaaaactgtcgatattcacgtatgctctgataaacgcttcctgcgcaatatcttccgcctcatgcgcattgccgagcatacggtagcaaagctgataaattttgtctttgtaaatatccacgatgtctgcaaatgcgttacgatcgccttttttcacctgtttgattctttttttaatcattgtttccatatttatctaacctctgccttcaccggtctttatgtatacgaattggtttttataaggtttcattaaattcataaaaatagtttatcaaatttttggcagggtgtagatgctttgacagggttcatgcgcttaatattagcttaaaattattatacatcataaatattatgaagttgagacttctatcataaaaaagagcagcctgaagccgctcttcaactgcacctaaagcagcttttcgccaaacagcgatcccattaaggctacagccgcttccgccgtcctgtttttctcatccaatatcgggtttacttcgacaaactcggcggacgtaatcagcttcgattcctcaagcatttccatagccagatggctttccctgtagctgatgcctcctgctaccggagttccgacacccggtgcatcgttcggatcaagcgcgtccaaatcgagtgacagatggacaccgtccgtcctgcctcgcaaatagtctatcgtttcttccatcacccttgtcatgccgaggcggtcgatttcatgcatcgtatatactttgatccctttgtcgcgaatcaattctttttccccgtcatcaagtgacctcgcaccgatgatgacgatgttctccgctttaattttagcttcttttccatagatggcggtcagcccttcgtggccgattcccaggctgatggcgagcggcatgccgtgaatgttgcctgagggagacgtttcttttgtatttaaatcggcatgggcgtcataccagatcacacccaggttttgataatgcttcgcaaggccggcaagcgttccgatcgcaatgctgtggtcaccgcccagcacgagcggaaaagcgccagaagctacgatattatcgacagtctcagcaagttttacactcgcttttgtaatcgctttcaaatttcttagctcttcagatgccggctccccgccttctttctcatcctctctttgcccgatcgtcatatcgccgaggtcttcaatatcctgacaaagacattccagccgttcattaacacctgcacagcgaatcgcgctcggtcccatatcgactccccgcctcagctgtccaagatccatcggcacgccgatcattgaaatctgctgttttaacatatgatatccccctttcagaccttcattgtaccttccgattcggaattgactcaacaagacatttttttgaatagttatacaaaaaagacaaaataaaaaggacatccgaacaggatgtccaaaaactgggctagctggattcgaaccagcgcatgacggagtcaaagtccgttgccttaccgcttggctatagcccaataatggtggagggggacggattcgaaccgccgaaccctgagggagcggatttacagtccgccgcgtttagccacttcgctacccctccaaaaacagtgccggccagaggacttgaacccccaacctactgattacaagtcagttgctctaccaattgagctagaccggcatgatacggtatcttatgcagttaccggcgcggttgtgtctaaaaccgcttcgaaaaatggtggaggatgacgggatcgaaccgccgaccctctgcttgtaaggcagatgctctcccagctgagctaatcctccgaagtacaggacgtacaagtgcatgcgttgcaacaggacgttgcgcttttagcatgccttccttgcctttgaagtacaagtgcgcgttgcaacagaatgttgctccctttagcatgccttccttttcccagcgtgccgtccaaaaaagaatggtgacccgtacgggattcgaacccgtgttaccgccgtgaaagggcggtgtcttaaccacttgaccaacgggccatcaccgtgtttcaagcagctctcgtaaagctgacaaaagttattatatacaggttcctccccatttgtaaagaggtaaattaaaatttttattttcaaattttttattcatagagattgagaaaagcgcggaaattttgtttaaaatagggctatctgatgtgcaagagaggggaccgaataatgatactggtaagttcatgtctggccggagtggaatgccgctataacggttcgcacagctatgtcgaaaaaatcaataagctcgttgaagaaaaaaaagcggtgatggcttgtcccgagctgctcggcggatttcaaacaccaagggaaccggccgaaattataggcgggacgggagaagacgttttagacggcaaagcggtgatcaagacacaatcgggaaatgacgtaacagacctatatataaaaggggcatatcaaacattggagatggcaaggcaaatcaaggctgatacgatcgtgctgaaggaaaacagcccgtcttgcggcagcagccatatatacgatggaagtttctcaagcaaaaaaatagccggcaacggccttacgtcggcacttctgaaaaaagaaggcttccgtgtgatttccgaacatcaaatagacgagctgtagtaccaggacataagcgcagttcatctgcgctttattttatttcggcgttcagatgtttagaacctaattgaaacaaaattttaatatttatcttttgtcattgaaattatattccagccataatatactgaaaattaagaaatatatgcattttatgatcaggaggatttgtcgatggaaaacagccatttaggttccttaacaaccgaacgccgcaatgaaagatccaagcgcattcaccaggcagaaacgatcgatatgttgaaaatcatgaatgatgaagataaaacggtagccgaagctgtacaagaagtcttgcccgatgttaagaccgccgttgactacgccgtcgggtcgttaaagaaagggggacggatcatctacatcggtgccggtacaagcgggaggctcggcgtacttgatgcagctgaatgcccgccgacattcagcatatctcccgagtcggtcataggcatcattgcagggggagaaaaagctttgtacaatgccgtcgaaggcgctgaagatcatgaggcttttggcagacgggatttagaagccgttaacctctcaaacaatgataccgtaatcggaatcgccgccagcggccgaactccgtacgtcctaggcgccctgaagtatgccaagaaaacaggtgccaaggccatatcgctgacatgcaatgaaaactcggcgatcagccaggcggcagatcacagcatagaagtagtcgtcggccctgaagtcattgccggatcgacgagaatgaaagccgcaaccgctcataaaatgattttaaacatgatctcaacggcggccatgatcaaaatggggaaagtctatgaaaacctcatggtagatgtaaaagtaagcaatgacaaattaaaggagcgggcgatccgcatcatccaaacggtcacaggtatgccaaaagaaacagcggcgcaagcattggaaatgtccaataaccaagtcaaaaccgccatcatcatgctgaaaacaaacgaagatgcagccgctgcagaaaaactgctggagaaatcagaaggcgatattgaaaaggccctatccatttatgaaaaatcttaaataagaaaggaagaaacaatggctgcaggaggattggaaatcattcagaatatgcttcacaaattgccgcaatctgaacgaaagcttgccgaatacattttgaaaaacccccacgagatcgtaaacggcaccattcaggaggtgagctcttcggcaaagacaagcggggcggcggcgatacggctctgcaaatctttggggctgaaaggctttcaagatttaaaaatgagagtcgccggtgatttaatgaagccgtctgatcagggataccgggatatcgaaccacaggagccgctccattcaatcgttcaaaaaacaaccagcaattcgattcaggcgattcgcgatacctttgaaaacattgaccacgaagaacttcaaaaagcgattcaaatattgatcaacgcagaaacggttcatttttgcgggatcggggcttcaggaatcgtcgcacaagacgcccagcagaaatttttgcgcatcaataaaaaggccaccgcttttagtgatatgcatcttgttgcgacattaatcgccaatgccggcgagaatgacgttctgtttgctatatcccattcaggagaaacacaggaaatcgccaatgcagtcaggctcgccaaaaaacatggtattaaaaccattgggctgacgcggttgggacagtctgctgtcgcttcattaagcgatatcgccctgtatacgtcatgctcaaatgaagcgccgtttcgcagcgccgccacctcctctcgtttaactcagctttacatgattgacttactgtttttaggcatggccgcagagcgctacgaggacatcattcagtatattgatcaaacaaaagcggccatccgcatgatgggaatttagcgaattgtaaaaaagggggatataaaatgagcgatgagaaaaaatatgccgggctggcaagactgattttacaacacatcggcggcccgtctaacgtcgcagatcatacccactgtatgacgcgcctgcgcatcacgcctgtcaacagtcaaaaaaccgacatcgactcgatcaaagcgcttgaaggcgtgatcggcgtagttgaggaggaaacgcttcagattatcctcggcacaggcgttgtacagcacgtatcagacgagttcgggaagctgcttaaatccgcagaacacgttgacttaaaagaatccgcagccaaacataaagcggagatttccaagaaaaacgcgacgcctttcaagctgtttctccgacgaatcgcaagcatttttataccgctgatccccgctttggtcgcctcaggcttgattaccggaatcaccaaagccgttatccaggctggctggctcgcggaaacctcacaaaccgcgattattttaacggtaataggctcaggtctatttacgtatttgggtatcctggtggggatcaatacggcgaaagaattcggcggctcccccgcactcggcggattagccggtattttaatcattaaccccgccgttggtgaaatttcacttttcggtgaagcgcttttgccgggacgcggcggtttaatcggcattttattcgcagctgcatttatcgcttttctcgaaaaacgggtcaggcgccttgtacctcactcactcgacatcatcatcacacctacagtctcccttcttatcacaggaatcgtcacctacgttgtcttcatgcctgtcggcggcttgatttccgacgccattacgtcaggtcttctcgccatcttagatcttgggggcattatcgccggctttgtactgggcgccaccttccttccgctcgtcgtaaccggacttcatcaaggactgacacccgttcatatggaattaatcaattcaatcggcgatgacccgctgctgccgattttggccatggggggcgcaggacaagtaggcgccgcttttgcgatctatttcaaaacgaaaaaagcaaagctaaaaagagccattgccggcggactgccgtcaggcctgctcggcatcggcgaaccgctcatattcggtgtaacccttccgctcggacgtccgtttttaaccgcgtgcctcggggccggagtaggcggagcatttcaagcgtatttcaaaattgcgaccgtatcgataggcgtatcagggctccctttgtcgtttttggttcatacccaccaagttcttttgtatattctcggtttgtttatttcctatgctgccggctttgtcttaacatactcctttggtttcaagtacgatatggcagttgaatttgattaaacgtttgtttaaaatttcccactatgcaatttttaacagaaaggagtgaagcaagctgaaaaagtttatgatcagtgcggccgcgtccctattgctgctgacatgcttttttccgcttccgtccacagcacagactgccatcgggaacgagacaaaacagcggctgacatatcctgttttaacgaaagcgaaaacgcctgaagaagccggtttttcttcgaaaaagcttaaagctgtggaccgtctgatcgaacaggatgtcaaagcgggctttcccggcgctgcccttattttgattaaagacggaaaaatcatcaaaaaagaagtctacggctacaagcagaaatacaacggcctcatagcgctcaaacatccaaaaaaaatgaaagcaaacacgatgttcgacctagcctccaatacaaaaatgtatgccgtcaattttgccttgcagcatttagtgagcaccggaaagcttgacttgaacaaaaacatttctcaatatctccctgatttcaaagatcacccggaagacgatgtaaagggaaaaaaccggctccgcgtgattgatttgcttcatcataacgcaggcttccctgcaagctggaattattacgacccgaaatcagccggacacctctactctcaatcacggagcaaaacgcttgaatatcttgtgaaaacccccttggcatatgaacccggcacaaagcaaatttacagtgacatcgactatatgctcctcgggctgatcattgaaaaaatcacaaacgagcgtttagatacctttgttgaaaaccggttttaccggcctctcggattgcggcatactttgtttaatccgctccaaaagggctttaaacggtcgcattttgcagctacggaacgattgggaaacaccagagacggcaccatttcgttcccaaacatcagaacttacacacttcagggggaagtccacgatgaaaaagcattctattcaatggaaggcgtttctgggcatgccggcctgttttccaccgttgacgacgcagcagtgctccttcaagtcatgctgaacggcggcggttacggaagacagcatctattcagcagttctgtcatttcacaatttacagagccgtcaaaaacaaatcccacatatggactaggatggcggctcaacggcaataccgatatggagtggatgttcggcaagcacgccagcagcaaagcatacggccataccggctggacgggaacggttactatcattgatcccgtgtatcaaatcggcattgtgttgttaaccaataaaaagcactctcctgttatcaaccctaaagaaaacccgaatcaattcgaaggtgatgaatttgcaaccggaaagtacggcagcgtcattacagctgtttacgaggcgttacatcaccaataggaggcgaccctttatatgaaaagatttcttcaatgcgcgttgattgcattgctgttatcgtctctcgctttgcagccggccgctcgcgaagcagaagcaaaacagcgtccggaacaaaacatcaaacaaatggtcagcagcatgtcgcttgaagagaaaatcgggcaaatgctgatgcctgactttagaaactggaagaaaaaaggggaatcgagcgccaaaggattaacagaaatgaatgacgaagttgctggaatcattgaaaaataccggctcgggggcgtcattctttttgctgaaaacgtcacaggcacagagcagactgtacggttaacggacggcctgcaacaagcgagccctgacattccgctctttatcacgatcgatcaggaaggcgggattgtcacgagactcgaatcaggcacaaacctggccggcaatatggcagtcggagcatcgagaagcagcaaaaacgccttcagatcaggaaaaatcatcggaaaagaattatcatcactgggcattaacgtgaatttcagtcctgtacttgatgtcaacaacaatcccgacaaccctgtcatcggcgtccgttctttcagttccaagcctgagctgacttcaaagctcggcatccagatgatgaagggccttcaggacgagcaaatgatcgccacagcaaagcactttcccggacacggcgatacagcggttgacagtcattacggattgccgcttgttccgcataatgaaaaaaggctgagaagtgttgaacttgcgccatttcaaaaggcgatcgatgcaggtattgacatgatcatgacagcgcatgtccagttccccgcctttgacgatactacctataaaagcaaaaaagacggcgaggacatcatggtgcctgctacgctttccaaaaaagtcatgacagaccttctccgcaaagatctcagctttaagggcgttgttgtaacagacgctttaaatatgaaagccatttctgataatttcggacaggaggaagccgtcgtcatggctgttaaagcaggagtcgacatcgcactcatgcccgcgcaagtcacatcgcttgagaccgaaaaaaatctggcgcgtgtattcgaagctcttctgacagccgttaaaaatggggatatccccatggaacaaatcgatcagtcggtggagcgaatccttcaattaaaaatagaccgaggcatcatagatcacaccggctccgaaccgcttcagaaaaaaatcaaatacgccttgaaaacggtcggcagcagcaaacacatgaaatacgaaaagaaaatggcaagggatagcgccactatccttaaaaacgacaaaagcaccctgccgtttaaaccgaaaaaaggggacaccgtcctcattctcgctccatatgaagagcaaacagcagcaatcgcaaagaccatcagcaaaataaggaaaaacatcaaggtagtcgaataccgctttgcagaaaaaacgtttgaggaagagattcaaaagaaaattgacgaagccgattatgtcatcacaggatcatacgtcatcaaaaacgatccggttgtgaacgacggtgtcattgatgacagcattcaagactcaagcaagtgggcaaccgcttttccgcgcgccgccatgaaatacgcgcaggccaacggaaaaaaattcgtcttaatgagcctgagaaacccttatgacacggcaaattttgaagaagccgaagccgtgattgcggtatacggctttaaaggctatgcaaacggacgcttcaggcagccgaatatcccggccggagtggaagccattttcggaaaggcaaagcctaaaggaacattgcccgtagacattccttcagtcacgcgccccggggaaaccctttacccgtatggctacggattgaatattaaaaacggcaagccgcttcacaaaggagggtcatgatgggaaaaaaagcaatctggctgcttgctggaatgtttgtcttcagtacactaaccgcagcagctgcctttccggacaaagaaaaaaaagcaaaggtctcaccgggtattgaagtgctcatgaacaaaaaaagcatattaaaaggaaaaagggtcggtctcattacaaatccaaccggtgtcaattcgacattaacaagcagcatcgatttgcttcaccaagcccccggtattgagctgaccgctctctatggtccagagcacggtgtaagaggagacgctcaagccggtgacaaggttgactcttatattgatgaaaaaaccggtctccccgtctacagcctctacggagatacgagaaagccgacaccggagatgttgaaaaacgttgacgtcctgctatttgatatccaagatgtcggaacacggttttacacttacatttacactatggcatatgcgatggaagcggcaaaagaaaatgatattccattcatcgtccttgaccgcccaaacccgcaaaacggcttaaaagttgaagggcctgtcctagatccggattattcttcatttgtcggaatgtatcccgtccctctaagtcacggaatgacggcaggagaattggcaaagctgtttaatgatgaatttaacatcggagccgacctaaccgtcataaaaatgaaaggctggaagcggcagatgttctttgaagacaccggtcttcctttcgtcctgccttccccgaacatgccgacgccggatacgagcatcgtctacccgggcacaggtttaattgaaggaaccaacatgtcagagggaaggggcacgacaaagccatttgaattgattggtgcgccttacatgaaaagtacggagctcgccgaaaaattaaacggtctgaagctgcctggcgtcagattcagagccgcctccttcaatccgacattttcaaagcatcagaataaactgtgccacggggtggagctttacgtgaccaacaggtccgcttttaagcctgtaaataccggtattgcgatcatcaaaaccgtccatgacctctacccggacgactttgagttcctcccttcaggcaatttcaaccgtctgatcgggaacggatgggtcaaaacaatgattgagcaaggcgcttcaattgatgaaatcgccaaaaaatacgaagcagagcaaaaacggtttatgaatatcagaaagaagtatttgctttattaggaagagcgggagccgctcttctttatttttgattagactgttcaatcattcccatctcatgtaagatatgtgaaactgcgtcttattagaggggagatacttcagatggatttttatcttgtggatgtgtttgcagaaacaaaatatacaggaaaccagctcgctgtttttaaagcagaaaagaacctatcaagtgatgaaatgcaaaaaatagccagggaaatcaatttttccgagactacttttatattgggaaaacagggaaacggcgggtacgatgtccgaatcttcaccccggaaaaagaaattccgtttgcaggacatccaacgctgggcacagcgtttatcattaagaatgaaatcgaaactgaaccatcttctaatgtcattttaaatgtaacagcaggcgcaataccggtgacgtttgaaaaaggtgctgatcaaatcatttggatgaagcaaaatccgcccgtgtttaaccgaacctttgataaagaaatgatggcgggggtaattggaatcgacacatctgatatggattcgaatttcccgatacaggaggtttctacagggcttccagcggttatcgtaccgttaaactcgttaaatgcagttaaaaaatgcaaaatcaacaaggatcggtttgaagctttcatgaaagaaacagaagcaagtctgctcgtttttactaccgaaacatatcatgaacaaaaccacatcaatgcacgagtattttgcgactgtttcagcgttcctgaagatccggcaacaggaagcgcaatcgggggtctcgcagggtatttactgcatcacggctattttaatcaacactacctcagcataagggctgaacaaggatttgaaataaaccgcccttccctgcttcatcttgaagcccaaataacggaaaacagcacagaaattcacgtcgggggaaacgtccacctgatcgctaaaggaagttggcaaatttgaacacaactttgaatatcagaaagaggcacttgctgacgtccggcgaaaagcaaccactagccaaatcacattcacaatcgctaacagaacgcaaagacctgcgacacccagtaatgcagaagcatttccgccaatagcgccaatcaacacaaacactggactcatagtcagcgtgatgattaacccaattccgcaaagaacagccattacaaacttcattgcatcaaacccggccatataaacagcgaggggcagcatataaaagagcaaaacggttccgattgccgcccacatccccaaagtgccaaactcattagcatgagggcctgaatgagcgagcggagaaagtgaagctgcgactatcatagaacaaaacagaaaagcggagattaaagtccagatcattacacttactctattggttttcattatatttaactcccgcaagatctgagtctgccaactatgagggcagactcgtctttttgtccaaatgatgcgcttttttcagctcgcttcttgcaagcaaatgcccaaacagcgcggccagaatctgttggaacagcatgccaatgacaacgggcaccgccacttgaggcggaaaaaagctagtggccaacacagcgcccgcgctaatattccgcattcctccagtaaaaattaaagccacgatttcctcctggggccgcttcatcagccgtcctatcagccaagctgtcaggtagcctgtaaatgccaccaaaaagaccgtaacggctatcgttaaaaactttaaatcgacgtttttaaggtaaggagcgaccaccgagctgttaatcgccactacggcggctaacccgactttcgaaaacggagcacaatttgcgcttaatcgcactgtccgctccggcgttgaaaattgattgacgagcattcccaataaagaaggaatcacaatcattccaactaaccccttcatcatgccgatgacatccatttcaacatgcgccccggccaagatggaaagactgaatggaacaataaaaggcgaaagaatcgtgtccactaaaataattgacagggttaaaccgatgttacctttatacattgcagcccaaatcatgctcgtaatacccgtcggaatgacaacaccaagggtaagccctgtaatcgtcaatgaatccccgctaaacacaagatgccccgtgctccatgccaaaacaggcataaatatgtgcaaaacaaataaagcgagaaacatcggcaagggatgagccaccgctgttttcagcgactgaaaatttgctcccaggctgccggcaaacgtcataaacgcaaaaatccacggcacaagactcgccagcccatttaaataatctgcaagcagtactccgctgacaacgcttaaaggcgtcagcaaaggcataatcttaccaagtgttttattgattgtctgaagcatagatgtaaaacgcccgctctctttaaatcgaatttacattcattataacaaaagatggaatatcaaaacaggaagggaatacagaaagaaggcaggatgatggtgaagcttttaagcataatgggctgaatttctttttttatatgggaacacggacaaaatggactctattttaaacattctgatctgttgtttttggaagcaaaatgctttcacataaccgttttttatttctttcacaagaatcgcccgcttagaaaaaccgctttttttcatgtatatgatttctaccggaatgccgtcttccatggaacgatacaacagcttattcatcgtctcacctcacattctattttatacgaacatttgttcttgatcaagtgtaaacaaaatgtaaattttggcattattcgagttcatgtatgaaaatattagcattttgaagaaactttttaaggggttattgcgtcagtaaatacgtcacatataaaagaaggagtacccgacatggcaagaacatacagaacgcgaataaagaaaagaaaaaagcagaaaacaaaaagaaggcttatcatattttcctttttggttgtttgtggattaatttatcttgcacttccaagcggtatgcgagatcaccaggaaaaccaattgcaagcaactgaaaaaaaggcacagcctgaagcaaagaaaaagccaacacaaaatgaaacaaaaaagagcaaaatcgtcacaaaaaatgataatgctcaattggatcaatatttgaaaagcattggattcagcggcacagcattgatcgtagaagatggaaaagtggtgacaagcaaagggtatttatatgcaaaccgcgaggaaatggttcccaatacaccagataccgtcttttatgtggggtcatcacaaaaagcgattattgcaacggcaattttacagctggaggaaaaaggattgctatctgtaaatgaccctgtttctaagtatcttcccaattttccaaacggctcaaagatcaccctttatcatttcttgacgcacacatccggaattaggggtcacaaagaaggccgcggatatatttcgccggaagatttaattaaagatatcgaaaaacggggtgtaaaatacccaacagggaaatgggattatagagactccaattactcggttctggcatacattgtttccatggtaagcggtgaaccagtcgaccaatacatcaaaaagcatatttttaaacctgccggtatgaaacatgcaggcttttataaaacatttgctaaagagtcaaatccatcgacaggatataaattaaacctgcaaaaaaagctttatacgcctgacatgccggatttatcacagctttacggggccggtgatatttatatgaccgcttatgacatgtatttgtttgataaagcactttacgaaagaaaaatcatttccaatgaaagttttatgaaaatgtttacgccgaataaagcaacatacggcatgggcttttatgtgtctccaggaagctattcaagccacggtgtcatgcccggctacaacatattaaacagtttcagtctgacagggagcagatacgtcattctattttcaaacatccaaaacaacattaagtcttttggcagtgtgaataatcggatcttctctattttaaatggattttgaacagcagagaaagtttttacagctaaaagggattttaattataaatgtagaagatagatgataaatgaattttcaatataaaggaaggtcgtcatgtcattattaacgcttagcaaaatcgtgaccattttataggcgttgctgcattatttatatggacttttaaagactcaaaacagcatgaacctgatacgttaaagtacgcaagttatatgttgtctcttcttgtctttgaagtcacactgaacgttttatggggataaaaataaaagcaggcatttagcctgcttttatacattcaataagtctaaaagcaaaatatcgcaaaaacaaaaaaagctttccccacaacaggagaaaccttgtcatatcaacgtattcacttaagcttccaagcgggctcgaaccgctgacctcttccttaccatggaagtgctctacctgctgagctatggaagcattggctccgcaggcaggattcgaacctgcgaccgatcggttaacagccgatagctctaccactgagctactgcggaataagaaaagcttcaattcatgcagggtaaagatatataacatgtttatattatcgcggggtggagcagttcggtagctcgtcgggctcataacccgaaggtcgcaggttcaaatcctgcccccgcaaccaaatataatttgcatacaatcaaacaaaataaataaaaatatggtccggtagttcagttggttagaatgcctgcctgtcacgcaggaggtcgcgggttcgagtcccgtccggaccgccatgttgcacacaaacgaaatcttcgaggttttcgtttttttttatgtcttttttcaggtcaatgctgaaactcggtttctcttctgacgggatgtgaagctcgaatttctttattccttggataattggtgagaattcgataaactaatgatagtgttttgattggtttgcaacagcaaaggagcaaatgatcttatggacgaatttgaattaattcaaaggattacgccccgttcgctttctcatcgggaaatagaaatcggtattggagacgatgccgctgtttatcatacgaagaacaattatcaggagatcgttgcagtcgatacgatggtcgacggtattcattttttatcatcccattcatcgcctgccgatatcggatataaagcattggctgtgaatattagcgatattgccgcaatgggaggccgacccaagtactatcttgtgtcaatcgccgttccttccggttggggcgcgacggatattgaagccatgtatgaagaaatgaataaactggcgacactatatgaaatggatttaatcggcggggacaccgtatctgcaaacgggccgctcgttttgaccgtaacagcaatcggcgaaattgaaaagggcagatcttgtttaaggagccatgccgagcccggtgatgtcgtttttgtgacgggagaacttggctcatcagctgccggcctgtcttttatattgggccaaacatcggcgagagacgagacgcagtctcaatactttattgagcggcacaagaggcctgagccgagggtggaagcaggtttgatctgttcacgctatcaccatgtggcgcttaatgatatcagcgacgggcttgccagtgaattaaatgaaattgctgaagcgagccgtgtttccattgacatatataaagagttgattccggtccattcggatttacatatattgcacacaaaatgggaagagtgggtccttttcggcggcgaggattttgaactcgtcggtacgatttctaatgatcaatgggaacgttttagtcaggaatgctccgagcatgatgtgcgggttcatcaaatcggccgcgtcacaaaacaaggacaggcggaagtgttttatcatgacggacaggaccgcgttcttctcgaaaaaaaaggatataaccattttaaacaagacaggtgacaagtaaagtgaaaacgttagagtggaaaacgacagagcctgaagagacaaaaaacattgccaggctggcggcaaaatatgttcagcccggtgatgtcatcacattggagggcgatcttggagcaggcaaaacgacttttacgaaagggtttgccgaagggatcggcatcaagcgggttgtcagcagcccgacttttaccatcatcaaagaataccgtgacggctctcttccgctgtttcatatggatgtgtacaggatggaagacgagacggaagatctcggattagatgaatattttgagggagacggcgtctgccttgtggaatgggcgcatttgattgaagagcagcttccaaaagaacgccttgaggtggtcattaagcggcttggtgatgacaagcgaaagctgacctttacacctaaaggcaggcgctacgaaaatctttgcgaggagatcagcaaacatgacgatacttgcgattgatacatccaatttaacgctcggagtggcattaatcaaagacggaaaagtgatagccgagcatatatcccacttaaagaaaaaccattcggtcagagccatgccggcaatcgacgaactccttaaagagtgcggtttaaagcctagtgacctgacccaaattgcagttgccaaaggcccgggttcatatacaggcgtgcggatcggcgtgacgattgccaaaacgcttgcatggtcattaaatattccggttaaaaccgtttcaagccttgaagtgcttgcggcaaacggccgttttttccaaggcttgatttgtccgttgtttgatgctaggcgcggtcaggtttatacgggactgtaccagtatagggacggcaaactccatggattggaagaggaccagaacattctgcttgaagattggctaaaaaagctgaaagccatggatcagcaagtccttttcataggaagcgacaccgggattcacagggaaatgatcgaacggattctcgatgaacaagcggttattgcagaccctgccctgcagcttccaagaccttcagaattggctttaatcggagaacttaaagaggacgagccagtgcacagcattgttccaaactatattcgtctggccgaagccgaggccgtctggcttgaaaaacaaaagtaaacgggtgaagccatgaacacgcaaatggtcatacgcgatatgaatccaaaggatttggaccaggtttttgaaattgaaaaaagctctttttcttctccgtggaaaaaagaatcttttcatcatgagctttttcacaatatgtatgctcattatctcgttctcgaagttgaggagcaagtcgtcggctactgcgggatttggatcgtaatggatgacgcccagatcaccaatattgccgtttcacctgcataccggggccgccgcttcggtgaagctcttttgaaggcggccatgaagctttgccggatgaaaagggcggttcagctttctttagaggtgagggtatcgaatcatattgcacagagcttatacaaaaagctcggctttgagccgggaggaattcgcaaaaattattataccgataatggggaagatgcattattaatgtgggtgagactaaatgaatcataaaaaagatctgtatgtattaggaatcgaaacaagctgtgatgagactgccgctgcgattgtcaaaaacgggacggacatcatctcaaatgtcgtagcgtcgcaaatcgagagtcataaacggtttgggggcgtcgttcccgagatcgcatcaaggcatcacgtggaacagatcacgatcgtgcttgaggaagcctttgcacaagcggacatgacgtttgatgacattgatgccattgcagtaacggaaggaccggggcttgtaggcgctctattgatcggcgtgaatgctgcgaaagcgctcagttttgcccggggcataccgctcgtaggcgtgcatcatattgccggtcacatctatgccaacaggcttgttcaggacattcaatttccggcgattgcccttgtcgtctcaggcggccacaccgaactcgtatatatgaaagagcacggctcatttgaagtaatcggagagacgctcgacgatgctgcaggcgaagcctatgacaaagtggcgagaacgatggggcttccttatccgggtggacctcacattgacaaacttgcgcaaaaaggcgaggcaaatgtgccgctgccgcgcgcatggcttgaagaagggtcttatcatttcagcttcagcggattgaagtctgcagtcatcaacacgcttcacaacgcttcacaaaaaggcgaaacgatagctccggaagatttgtcagccagctttcaggaaagcgtcatagatgtcctcgtgacaaaaacggaacgcgctgcggaagcttatggcgtcaaacaggtgctgcttgccggaggagttgctgcaaacaaagggctgagagccgcgctcgaaaaaacgttcagcagccgtccggagatcgagcttttgatcccgccgctctcgctgtgtacggacaatgccgccatgattgccgccgcaggtacggttgcttttgaaaaaggaatcagaggaaaatatgatatgaatggtcagcctggcttagatctgacgtcttattgaaacctcacgctttgtgaggtttttttacccggaaaaagttattaacaagttatcaacacatatccacagtcttgtgtataatgttaaaaaccttaatttacagaccttttttacctgttagtaatgtgtataaatattatgttatttgtggatattgtgggtaaatcgctttctttcttttaaataaaggatttcaattgtggacaaaaaaaccgctccggcttggagcggctcatcctttattcatttgtagatagtgtttcccattctgataacagctgttcaagctcctcattcagctgttcattttcagagtggatttcctgaaccttctcgtggtcttggaagacgtcgggattgcataggagctcttcattcttttcaatttgttcttcaatggccgtaattcttgtttcgatgtcttcaatcctgcgctgccgctggcgttcttttcttttcagctctttttcttcttcatagctcttttttgcgcccggtttttcggaagcggctttctgacgctcttccgtctgtttttctagttctttcagttcaagctgctgcgcttttttttccgtgtaataatcgtagtcgcctaaatattcttcggctttgtcgcgagaaagctccagtacttttgtcgcaatccggttgataaaatagcggtcatgggacacaaataatatcgttcccgggtaatcgattaaagcgttctccaagacttccttgctgtccaggtcgagatggtttgtcggctcatcaagaataaggaagttcgctttttgcaacatcagcttggcgagggcaagcctggctttttcgccaccgcttaatgcatgtacaggctttaatacatcttctcccgagaacaagaagttgccgaggcaggtcctgatatccttttcattcatctccggataatcgtcccaaagctcgtcaagcacgcgttttgacgacgtcaattcagcctgttcctggtcgtagtatccgattgagacgtgagagcccgtcgcgattgttcccgacaccggctgcagcttttggatcaatgctttcaaaagggtcgacttgccgattccgttcggcccgactagtgcaacgctttccccgcgggtaatgcgaaaatccagtgaacggagaagcgggggctggtcctgatagcttaccgtcaggtcttccactcgcagtacatcgtttccgctttgccttgtaatttcaaagcggaatgacgccgacttttcatctccaagcggtttgtccatgatctccatccgttcaagctgctttcgtctgctctgcgcccgtttcgtcgtcgaagcccttgccaagttccgatcgacgaaatcctgcagcttggcgatttcgtcctgctgcttttcgtaaagctttgtttccctttccagctgctcggcttttaattggagataagagctgtagttcccgatatattttttgctttgggacctggtaatctcgtaaacttgggtaaccactttgtcaagaaagtacctgtcatgggaaacgattaaaatcgctccgctgtagctttgcaaatattgttcgagccatgtcagggtgtcgatatccaagtggtttgtcggttcgtccaaaatgaggaggtcgggttttgtcaaaagcatttttccgagggcaagtcttgttttttggcctccgcttaaatcctgaacgcggacggagtcgtcaaatcccgcaaagccgagcccgtgcatgacggatctgacctctgcctcatattggtagccgcctttgtccttgaactcctgctgaagcctgtcatatgtcttcattaatgattcaagcttgtccggtccggcttgcgccatcttttcctcgatcgcgcgcatttctttttccatttttttaagaaaatcaaataccgacagcaattcctctttaagcgtcagcttggaatcgaggccggaatgctggtcaaggtagcccatcgtcaaatctttaggtttgatgatgtcccccttttcgtatgagagctttcctgcgataatctttagaagagtcgattttccggcgccgttgcgtccgacgaccgcaatccggtcccgagacctgacttcgagttttatattcgttaaaatcgtatcggctccaaacgattttgaaagctgatttacttgtaaaatcatcatgatctttcacctcttgtctgctattttaagtgtagcctatcaccgcgcagtcagcaaacaattaagtgaagtctggaagattttagccaaagaaaaagacagattgaaaaaaatagtgtatgatcattataaggagagttaagaacatgaatgagtttacacattttaatgaacaaggcagagccaagatggttgatataagcgaaaaggaagcttcagtgcgcacagctgcggctgtttcaagcgtgtccatgaatcgagaagtacatgaaaaaatcaaaaaccgcgaaatcggaaaaggcgatgtgttggcggtggcgcaagtggccggaatcatggctgcaaaacagacatccgccatcatcccgatgtgtcatccgatcgctctgaaaggagtcgacatcgccttttgctgggagaagaaagagcagaagagcatcctgcatatacaatctaacgtcaagaccaaagggagcacaggtgtggaaatggaagcgttaacgtcggcctccgtatgtgcgctgaccgtttatgacatgtgcaaagcggcggataagggaatggtgataggaccgacctttcttctcgaaaagacaggcgggaaaaacggtgactataaaagggaaaaagctgatgtagacatggaggattagtttatgaacatggatcattcaaaaattccgcaagcgacagcgaaacggctgccattatattatcgttttttaaaaaaccttcatgcatccgggaaacagcgtgtatcttccgctgagctgagcgatgccgtcaaagtcgattccgcgaccatccgaagggatttctcgtacttcggcgcgctcgggaaaaaaggatacggctacaatgtcaattatttgctgtcctttttcagaaagacgcttgatcaggatgaaacgacgaacgtaacgcttattggcgtggggaatttggggacagcctttctccattacaattttatcaaaaacaataatacaaaaatcgccatggcgtttgacatcaatgaagaaaaaatcggaaccgaggtcggcggcgttcccgtctatgacctgaataagcttgaagagcatatgacggatgatgatatcccggtcgccattttgacggttccagctcaagccgcacagtcgattacagacaggctggtggcgcttggcattaaaggcattcttaatttcacgccggctcgcttgaatgtgccggaacacattcgcattcatcatatagatttggcagtggaacttcagtcgctggtgtattttctgaaacattattcaatgcaggaaaagtaaaacggaaaacgaaaaataaataaaggaaagggggcaggctttatgccaacaatcggtcctggaagctttattttaattgtcgtggtggcgcttttgatattcggcccgaaaaaacttcccgagctgggaagagcggcgggaaacacgctgcgggagtttaaaaatgcgacaaaaggtttggctgacgacgattccgataataaaaagaaagaagatcagtaggataggatgacatttatgaagggaaaagaaatgtcgctgttagaacatatcacagaactgcgcagacggcttgtgatcacttttttcttttttgttttgtttgttgcggcaggcttttttttggcgaagccgctcataatctacctgcagcagacggatgaagcgaagctgctgactctcaatgcgttcaagctgaccgatcctttatttgtgtacgtgcagttcgcgttcatcatcggcgctgtcttgacttcgccgcttgttctataccagctgtgggctttcatcagcccggggctgtatgaaaaagaacgaaaagtgacgctcagctatattccaatatcgatcattctttttttaggcggcattgccttttcttactttattttatttccgtttgtcgtggactttatgacgagagtctcagatgatctgaatgtcaaccaggtcatcggaatacacgaatattttcagtttctgcttcagttgacgcttccttttggcttgttgtttcagatgcctgtggtcatcatgtttatcacaaggctcggtctcgtgacgccgatgtttttggcgaaaatccgaaaatatgcatattttgtgttgttcgtcattgcggcgctcattacaccgcctgagttattgtcgcatttaatggtctccgtgccattgctcattctttatgaaatcagtatcgtgatttcaagaatatcctacaggcaggcgcaaaaaacaatgattcaagaggaaaatcaatcgtttttgaacgaccatacaaaataagagccattcttttttcagaatggctcttttctttcaaataaaaggctattgatcttttcgcttcatcctgccggccagggcgaacattttaaaggagatgctgatattataggctgcgaaaagcatcagcaggatcgtataaaaagaccacatgcttccgggcgaggttgccgcgagatacgtaaacagcacacccgttaataaataaatcactccccagaatttagggcttctcatcatagaaatcctccaataatcatttgcattttctcgacgtttttcaaatattcttcaataggctcccggaatgtctgcagcaagacgacgagcgtattcatggcgacatgggcgaaaatcgggacgataatccggttggtcctgacatataaaaaggcgaatgtgaatcccattgccgtataaatgagcagatggctgaaatccaaatggacgaccgagaagagcaccgaactgaacagagcggcaacgaaaaaattcgttttctcatagatcgcaccgaaaatgatctttctgaaaatgatttcttcaagaatcggaccgaatacagaagagacaaacaccatcagcggcaatgcggtgatgattttcataatccgctgcgtattttcggattccgggttgaccccgaacaagttcatttcgatcgaagcggcaattgactgcgcaaacaaagcgagaaaaacgccggctaccgcccatccgattgacgctgcaaccgatgcttttggacgattgcgaagcgtcgtcttcggcaccgtccgcaaaatcagcagcacgatgacgagacagagggtaaacgcgatgacagaccagacgcccgtcaatgtaagctgagcttcagccttgggctgtcctctgcccactcccaaaaagtagagaagaggcaagccgacaaccgccgacaattgcatgagaacgtatgccaatataataaaccagtattgttttctcaagctttatgtactccttttctaaaaatctaaatcagactatgtttattgtaacacactctttttaaattataggatgataaggatatgcggagaaatgtaggcgcaaaaaaatttgaccttttcacttgaaattgcctgggagattctttattataagaattgtgttagcactcaccgagtgcgagtgctaaaattacatatgaaaatattgaggaggttgtttcattgttaaagccattaggtgatcgcgttgtcattgagctcgttgagtctgaagaaaaaactgctagcggaatcgtacttcctgactccgcaaaagaaaaaccacaagagggtaaagtggttgcagccggttcaggccgtgtgttagagagcggagagcgcgttgcattagaagttaaaacaggcgaccgcatcatcttctcaaaatatgcaggtaccgaagtgaaatatgaaggtactgactacttaatcttgcgtgaaagcgacattttagctgttatcggctaagtcataaataaaaacgagacaattatataggaggttcgaataacatggcaaaagatattaagtttagcgaagaagcccgccgttcaatgctgcgcggtgtagatgcattggcggatgctgtaaaggtaactttgggacctaaaggacgcaacgtcgttcttgagaaaaaattcggttctccattaatcacaaacgacggtgtaaccatcgcgaaagaaatcgagcttgaagacgcgttcgaaaacatgggcgcaaagcttgttgctgaagttgcgagcaaaacaaacgatgttgccggtgacggtacaacaacagcgacagttctagctcaggcgatgattcgcgaaggtcttaaaaacgtaactgccggcgctaaccctgtaggcgtgcgcaaaggtatcgagcaggctgtggctgtagctgttgaaagcctgaaagaaatctctaaaccaattgaaggcaaagaatcaatcgcacaagttgcttcaatctccgctgcagacgaagaagtcggaagcctgatcgctgaagcaatggagcgcgtcggcaacgacggtgttatcacgatcgaagaatccaaaggattcacaacagagcttgaagtggttgaaggtatgcagttcgaccgcggatatgcgtctccttacatggtgacggattccgataagatggaagcggttcttgagaatccgtacatcttagtaacagacaaaaaaatcacaaacattcaagaaatcctgccggtgcttgagcaagtcgtgcaacaaggcaaaccgttgcttctgattgctgaagacgttgaaggtgaagctcttgcaacattggttgtcaacaagcttcgcggaacattcaacgcagtggctgttaaagcgcctggattcggcgaccgccgcaaagcgatgctcgaagacatctctatcctgacaggcgccgaagtgatcacagaagatttaggtcttgaccttaaatcaactcaaatcaatcaattgggacgcgcttctaaagttgttgttacaaaagaaaacacaacaattgttgaaggtgcgggagatacagagcaaatcgcggcacgcgtcaaccaaatccgcgctcaagttgaagaaacaacttctgagttcgataaagaaaaattacaagaacgccttgctaagcttgcaggcggcgtagctgtcatcaaagtcggagctgcgactgaaacagaattgaaagaacgcaagcttcgcatcgaagacgccctgaactctactcgcgctgcggtagaagaaggaatcgtatccggcggtggtacagctcttgtcaatgtttacaataaagtagctgcccttgaagctgaaggcgacgaactgactggtatcaacatcgttcttcgcgctcttgaagaaccaatccgtcaaatcgcgcacaacgcgggtcttgaaggatctgtcatcgttgagcgcctgaaaaatgaagaaatcggcgtcggctacaacgctgcaacaggcgaatgggtgaacatgatcgacaaaggtatcgttgaccctacaaaagtaacacgctcagctctgcaaaacgcagcatctgtagcggctatgttcctgacaactgaagcagttgttgccgacaaaccggaagaaaacaaaggcggcgcaggaatgcctgacatgggcggcatgggcggcatgggcggcatgatgtaagcccagcgtccaaacgctgatatatcaaggaaaagaggctctttttagagcctctttttttaaaaaatcacataaaaatcacattttttcggttttaaaacttgtgataccttgtaggaaacatttcattttattaaatgtttctttcttcatcttgtttgttatgtgagtataaatttcaattgtggctctcatatcagtatggccaactctcttcataatctcccccagagtgtttcattatttgacctaactcatggcagaagtctttccagtgctgctccttgtttttaagagactatcgaaaaaaaccacattacttaaacaaaacttaaagatcccacacttgttaggcatgtacctaatttgaatgtctatctatcagcaataactttcatatcgacttgggaaggttctgctatgtttatttatatatatatgtattgaacttcttcttctaattttgaaaggtagtacattaaaatccccctgtataatgaaaactgatgctctctttttggtgatttgaaaacccgattaaacgggtttaaaagtttattttttcaaaacttgaagcgttattgaagtaacgaaaaggagcaggcataatgcctgctcctctatcttgaaactaacgagattcatttgaggatttaaggtaactgatgaacaatggtgaaatgacaattactgttacaattaataatagtctgctagatattaaatttacaaatgtagtgttaataatatatagggctaaaaccattaaataaaaagccacgtaaacataagcatacacttttttgctgaatggttctttcatgtaaatgaaaagaaataaccctgccattaaaactaagaaagtcatattttccctctttcatttttattgtggaaaaaccccagttggaacagctgcatatccgagtccagtaaaacgtattctaacaccatgaccttcatgttcgtcttgaatcatttgaccaaaaccaactagtccgcctccgattactccggaaattacgcttgctaattgtgtaggaggtacgggtataacccttgatattaaagcaagaccagaggttgctccaccgcctgctttaaatggttcttgtttcattacagtcaaaataaagattatatccccaccagtagagatcatgaccagatcgaccgcagccttttttcgctactttcattttatgattgtttccattctccagtgtcaatacactaccgtctttgtctaaaattttcacactaaaatcggagttaatgacagcttctttttgtttcactaaatcgttcaagtatttaatccagtcttgaacttcgttggtgacagaacgtgaaatatctagtttagtataagatggatctaaggtaagagttccatctgcgtttaatttaagataagcttctaatttctttacatcattcatactcacctttacattcttaaattcttcgctgttcagtttttgatcgggtgcagaatttcctttatatgctccagtagtttcagtatgtagtttttcgttgtcagttagttctgacgctgatactatattgaaaatacaggtgaaaccaatattaatgtcagtaccataacaaatgtcttaaaaccattgtgcttcttttctttcacgataatgccacccttcttattatagatcaacctcattttacttgaaaaacaaggtaatttgcggcatgatgtgtataacagtaaaaaagaaccatctaaaatcttgtgcgtaatgaaattatactaggtgtgattaattagaatatggagggctaatttaagaaggaaaaaaacgattaagatgaaggatgttatgatgtaactatgttgatctttggattataggtcttactttatttctctaaaaacagcatcctcaaatttaatgaaattggtgtctccttccacaatatgaaaaaccttacggatatgatttatgtaatgaatttttccttctatgttaatagtctctcctgattctgctctatttaaaaagggcagcggtttaaatacagagaacagaactgttaaattaaattccattgcttcacatattatcttatccatgtcttctatttgaaccatgtcaagaaccggccttttaaccttgttccgattgctttctaattcgcggagcaggctgaggtgttccgacagcatcatagctgttcatttgattgatccccgatctttcaagttgtcatctttcatggtgtttatctccttgagtttcaatcgtgaattaatggaaacagtgttttagctattttggttacaaaatcggtcacggtttcggaatttgaaggtgtatgcggcatgatgtaagcccagcgtcaaaaacggctgatatatcaaggaaaagagcatctttttatttaacttgcgatgacatataaatacccttttatccatggaataatttccttttgggggattatggtataattagcatctgaatttttaacagaaaggttaaacaattgatgtcgcacaacaaactaatgtttttgctttatcattttcatctattattcacctgcttggtacaatagtggaccctgcggctagctggaagccttggctggtgaacattgcattcattttattggttcttctatttttaaatctcactataaaagaaaatcaacagaacaagtagcggcatgcccttctcaaagagaagggcatatattttatattatgaacatcggtaagagtagccttaataaacgtcactctaattctgcatctgaatatcggagcttgctattgcccgtaatctctttcaacggccagtgcgtcagcaaatggcattaaaaccgcaagacctaaatttgattctttgtgaaaaatgggggattttaaaaagatggtcaaaaaaattgtaaatggattcaattcattttcactactggggacaatcttttttatcggcagttattttacgtacaaatttaatggcgtggagctggtcgggttcctgtacttaggtattatttttttgacagctctgatcgcaaccaccgtaatgttaatcaggctaaaaagaaaaggaatcaataaagataaacaggcttaatgcatgctttatacttattttagcttctctccgctagtgtaaccttttccaatccataatatagatctcttaaaagcatcacatgtccagtacatcaaatgtaatctcctgttcatactaatatcgggaggtacatcgacttatgttgaaaatttggatgactggacttttactattagcgcagcccgcggggcattctgacagcttaacgatcactcagcaagggaagaaagtggccgttgtgaaccgcgaagattttacaatgccgcttcccggaacaccgatgattgatgataaaaaatacaacgaattcgttgacaggcttgaacggaaagtacacaaggatcctgtcaacgccgtgatcaacgatcagggaaggatcgttcccggcaaggttggctacagcctttcccggaaggggtttaaggagcagttttacgcgtatttttatggggatggcccgtccacaatagaagtgcctgaattgaatgtttacccgaaagttgacagcgaactgctttcccatatccggacacagcggatcggccagtatgtgacgtactttaattccgggaataaaagcaggacgcacaatatttctctcgcggcaaaggcaatcgacaatcatgttgtttttcctaatgagacgttttcatttaacaaagttgtcggaatgaggacgccggacaagggatatatgaaggctcccgtgattgtgagaggcgaattgtctgaaggagtgggcggaggcatttgccaggtttcgtcgacattgtttaatgctgttgaccgggcaggactcgaaatcgtccagcgctattcccacagccggcgtgtcccttatgttccgccggggcgcgacgcgacggtcagctggggcggacctgatttgcgctttcaaaacaaatataaccagccggtcttgatccgggcgaaacggcacgggggaacgatggttgtgacgctttattcttctgatgtggtcaatcatcagctgcgaaaagtcccgaaggctccggcccaaattccaaaagaagagcatcaaagcggggatcactaaaggcgaatgttcatctggcgctgcacttgttcacacaatgtacaataaaatccttttgcctgtatgatagaatgaatcaaggacatctttaaatttcagacaagaggagatgatcgagtgacatggctttttgtaacctttttggtgatcttcagtctttttaaaatattggtcacttgccttccgagcggtgtcgtagagtggctgaccggcaaatttcaagttcatgtgaagcttgaggaatcgaatgttcaagtgacattcggcggaaaacgtttagagggatctgacaagagtcgatttattcaaaactttaatgaagcggtatttatggagcggtactacatatacccgggagatgagccgctgtatgtcaatccgaaaaacgccgggacaccgtttgtgatcgaaacaactaaaggaaaaaacgctgtgaagctgtttgtatacagatacgatgatcatatagacgtcgttaaacaatataagaaaaagacggccgcttattgtctgcgttctgacagtctgcaaacatgcggggggatgaaaacggcggatttgatttaaaaagcaggaaaaacctgcttttttattatgatatgaaatagagcctgacagcgccgtaaccgatcaaaaataaccaggcagcgattctttctttttgacgtgctgtacggctgtccatttcaccatcgcctttcttcattttattagcaataaaatccttgtattgcatattattctaaattaaaatgaggttgataaaaagtcttgcacagggagaaacgccatgaccatacatattcaacagcttgaagcccctctgaatcgtgagtttgttgatgaactgatcaatttgtggaatgataatacgttggaaacggctgattgtgcattagatgatcaagatagagaaatgatacaccagcagctggaacaatatgttcaatccgcatacggagcggtttttgccgtcgtgaatgagaagcaagaagcggtcggatacgggctggcctctattaagaaagatttggtcagcgattgtctgagcgggcaaatcgatgaagtgtacatagccccggactatcgaagaaataagctggggaagcttgttgcagaccgtatgatggattggtttgaacaacatcaagtctctcacgttcaagtatcggtcgatatcgataatcaatcggcgctgcatttttgggaaggcatcggcttcagcagtgatttttatcttctgacaaattagttttttgaatcaagtgggagcggccttcgttgtcatgcccggccgcctagctaaaaagccccttttaaggggcttttttgatgagctcaggagaattatgatgcggtgaattgacgagaggcgcgacttcatacgcttccatctcttttgacgcatatggttttaaaaggctttctaagtatgcaaggttttgattcttcggattcagccattctttttcagcctggcgatcaagaatgacgggcatgcggtcatgaatgtctttcattaaatcgttgggcgttgtcgtaatgattgtgcatgtatagacgggcttgccgcctgcaggctgccacttctcccaaagcccagcaaatgaaaacagtcgatttgttttgagcttgatcctcatcggccgctttgtctttgcatcggtccgcttccactcataaaaactgtctgccggaatgaggcacctttgtctgatcagcggctttcgaaagctcggcttctccgccaaagtctcagcgcgcgcattgatcattttataaccgattttctcatcctttgaccacggcggaatcaatccccaccgcagccgccctagccggttatgcgaaccgtcgttgatgacggcgagaatatactgggaaggcgcgatgttataactggggctgtaatcttcaatcgccatttgatcaatctcgaaacggtcaataatctcatcaaattcagaaaacagcgtaaacctgccgcacatcttaggtcacctttttttgtttattgaaagtttgaggcttttatatataaatggccaacaaggccgctgaaacagccatgataaagcagtcatcgcccgtcatggccacgccgtttttgatgaatacactgcaggtccagttgagtgccgatccttccgcggtccggtcaatcagttttttacccgctgtgtaaacacatgctttaaataaagaaaacgaaatggaacataaaataaagagcaaaataaactttaccatcaacaccagcattgccttttcaccccggcatattttgtaagctccaccttcattttaccaataaattcatctgttaaaacctctttcttgttttattatattgaccgaatggtcagcaatcgttacaatttatactaaccgattggtcaataacgaaaaggaatgatggtcaatgcctttacagctttatgaaaaagagcaaatactcgatgcctgtttggaggtttttgcccggcatggctatgcaaagacttcgaccggaatgctggcggaagcggccggcatttcaaaggcgctgatttttcatcattttaaaagcaaaaaagatctgtacttaactgtgctcgattattgtattgagaaggtaaagtcgcgcctttcccttgatgacctggcgtcttatgatgatttctttgaagcgaaagaaaaaataagcatggctaagcttgagtttttcgcggattattcaaatgtatacaagctcacgaaagatgccttttattcaccgccttccgaattaaaaaaagaaatcgctgcaaagtatggggagcaatttgccgttagaaatcgtattctaaaacagctttttgcgaaagttccgttgagggaaggagtggatcgtgaagaggcgttcgaacttatcatggtcatgatggggcattttgaacaaaagtttctagcggaagtaacggctgaggacgattttgatccagcctggagcagacgtcttcttgaagaacgaaaacggtttttggatatgattcgtttcggcattgaaggcgaataaaaagggggattcctgatgggacactatgtattgggctttcatgagatcgatcgaaccgatttgccgcttatcggaggaaaagggctgaacttgggcgaattgtcaaaaatggacggcatccaagtgcctcccggtttttgtataacaacaaaagcatatgaaaagatgatcggtgaaaacgataaggtcagtgaacagattgatcagctgtctcttttaaaagtgaaggacagaaaacagattaacgatcttgcccttcagatccgcaatggtattgaaagggccgaaatcgccgaagagatcaaagaagcggttaaaagcgctcactcaaatgctggcggcgatgcatatgcggtccgatcaagcgctacggcagaagatttgcctcatgcctctttcgccgggcagcaagatacgtatttaaatataaaaggaatagaggcgatcttgaagcatatcagcaaatgctgggcttcactgtttacagagcgggccgtgatctaccggattcaaaacggttttgaccaccgcaaagttcaattatcggtcgtcgtccagcagatggtgttcccggatgcgtccggcattttgtttacggcagatcctattacatccaaccggaaggtcacctcgattgatgcaagctttgctttgggagaggcgcttgtatctggtacagtttcagcagacaactacaaggttcgtgaaggcgcgatcattcaaaaaacgatttccgagaaaaagacggcagtctattctttggaaagcggcggcactgaggcgcgcgaagtcgaagcgggctgccggaaagagcaaacattaacagatgaacagatcatccggcttgaaaaactgggaaggagaatcgaagcccatttcggttttccgcaggatattgaatggtgtctggctgatggcgaatttttctttgtccagagccggcctataacgacattgtttcctcttccgaaacagagcgatgacaagcttcgcgtctatatgtctgtcgggcatcagcaaatgatgacagaaccgatcaatccgcttggaatatcgtttttcgggttgatctcggattatgagctgacttgtgccggcggaaggctttttattgatttatcacacgatttggcatcttttgcagggcggaaagtcgtcctcagtacggcggggaaaaatgatcctttcatgcatagcgctcttgtgaattttttgaaaagaaaggagcttgtcaaaaccctgccgaaagggaagcggatgtttagattaggggctgaagggctgtcatggtcgctgccgggtgatgcgctgaagatttaccggaaaaacgacacagatgtagtcaaacggctcatgtcgaaagcggaagcatccattcaagaggctgaacagcgattgaaaaacgcatcgggtgaaacgttatttgcacagatagaagaggatcaaaaaagcttgaaaaaagttctctatgattcagagagcatggctgtaattatggttggtttatatgccgtttactggctcaatcgaaaaatggagaaatggcttggcgaaaaaaatgtcgccgataccctttctcaatcggtattgtacaatgtcacatctgaaatgggattggcgcttttggatgtatcagatgctgccagaggataccccgaggttcagaagtatttagcatatgccaataatgaaaccttttttgaagatctcaaacagcttgacggcggtcccgcctttatcggcgcattgcgggcattccttgagaagtacggcatgcgctgcaccggtgagatcgatataaccaagacccgctggagcgaacgtccttccattcttgctccaatcattttgagcaacatcaagaattttgagcccggcgcgcgaacggctaagtttgaacaggggcgattggaagcggagaaaaaggagagggatttgttaagccgtctgcaacaactaaagggaggcagacaaaaggcaaaaaggacaaagaagatgatcagcgtgctgcggaattttatcggctatcgggaatatcccaaatacgctctgatcaaacgctatttcatatataaggaagcgttgatgaaagaagccgctgttttacagcaaaagaagctgatacaagcgaaggaggatatttattatttgtcctttgatgaattgaaagaagccgtgtgcacaaaccgtctcgatgtgaagaagatcgaggaaagaaaagcggaatatcggcattatgaaaaattgacgcctccgcgaatcatgacttcagaaggcgaggtcatcaccggagaagccttgggggatcacattccggcaggagcgttggcgggcgttcctgtttcatcggggatcatcgaaggaagggcaagagtgattctgaaattggaggaagccgatatcgaagagggggatatccttgtcacgccttttacagatccgagctggacaccgttatttgtctcaatcaaaggtttggtgactgaagtgggcggcctcatgacacacggcgctgttattgcgcgggaatacgggcttccggcggtggtgggggttgagcatgcgacgaaagaaattaaagacggacagaagatcaggattaacggatcggaaggatatgttgaaatactcgaatgataaaaagcgcagctagaagcttgcgctttaattcttataaaggtcggcggacaacatccaatccatcaattgctgatacggataataggtcgtgccatttaattcaattttaggtatgtcaggatatttacgcagcatttctttcgtttctactttgctcaagcctaaataataatgtaaatcgtcttctttgattaaatagggatagcctgaataacttccctttgggtttttaaagtttttcaagccgtcaccgataaaatagcctaaagccgctaaaccaagtccgatccaaaacaggttcatctccacgtttaccatccttttctcatattgctttatctgtcatacgaaaaggattgaaaaaagtttcaaggtcaaaggctttgccggttcagcatctcataaagaacgacggcatggttatggcgctcatctttggccccgtaaagcagaataacggtttcgtccgccgccattttttttaattccctgaagcttttctgtttttcagcgttttgtttaatttcgttttgataggcttctttaaacgattcgaattttttcggatcatgaccgaaccattttcttaattcggggcttggagcgatttctttcatccagcagtcgaggttcgctttttcttttgatatgccgcgcggccacacacgatcgattaaaatgcggcgtccttctgcttgctggttttcttgataaatgcgctggagaataaacggcatgcggatcactccttctcattttatgataaaacggcaggctggaaggaacaaccctattgaaaaagacaatgccaaaatcccgtttattcgatggaatgttttaaagaactgtacaattggctgacgctttcatcgatttcatctcttgacatccgcaaggctttttccgatacggcatagccgatttccaaccggccttcttccagccctttaaagatcgcatcggcaaattcatccagaggagctccggaatcatgcagtccgacaccgcccagatccgtattgaccgcaggaggagcgacttctatgacctcaacgccggcctcggaaagctggtgtcttaaactcatcgtaaaggagtggagagcggcttttgtcgatgagtagattggtgcgaccgccatcggtgtaaacgccagccctgacgacacattgatgatcgcagttttcccggctttttcggcaaagcattggctaaagagcatggccagatggataggcgcctccatattgacggtgatttctttattgtagtcagcccaattgtctataacatcggcttttaaaatgtggtagcgctgctgtatgcccgcattattcacaagtacgtttactcccggatgatgttctttgatccattcaaataatgccagtcgttccgcttcaacggccacatcgcatacacgcgtgatcagctccggatgtttttcctttgcttctttaagcttgctttcccttctcccgcagacgataacggtatttcccgcttttataaatcgttcggcaaaagcaaagccgattcccgatgcgccgcctgtgatcagcactgtgtttcccgacagttccattggaatccctcttttccgtcaaattttaaacaataggttgagcatctcttctgaccctataatgcccctttattttccaaaatgcaagtattctgattagacggtatgttccgattccattatcattgaaaagtgaaaggggtggaataaaatgtatgatacaactgtcgaaacacgcttcggaaagctgaaaggcagagcggaaaacggagtccgtatctttaaaggcgttccatacgcaaaacctcccgtcggcgacctaaggtttcgggaaccgcagcgaatggaggcctgggaaggtgagctggatgcttttcaatttggcccggtttgtccgcagcctgatggggtattgcctgagtcagcgggggttcaaaagtctgaggattgcctttatttaaatgtgtacgcacccgaagaggcggacggggatctgcctgttatggtgtggattcatgggggcgctttttatctcggcgccggaagtgaaccgctctatgacgggactcagcttgcaaagcagggaaaggtgatcgtggtcaccatcaattatcgcctcggtccgttcggttttttgcatctatcctcaattgatgattcctacagcagcaatcttggcctgctggatcaaatcgcggctctcgagtgggtgaaagacaatatcgctttctttggcggagaccgtcatcacattacggtttttggagagtcggcgggatcgatgagcatcgcttcgcttttggcgatgccgaaagcaaaggggctttttcaacaggccattatggaaagcggggcttccgcaactatgtccgataagcttgcgaaagctgcagcagaaagattcttaaggattctcgatattgatcatcatcatctggagcgccttcatgatgtatctgatcaagaacttcttgaagccgccgatcagctgcgcactttaatgggagaaaatatttttgaattgatttttctgcctgcgcttgacgaaaaaaccttgccgctgaagccggaggtcgccgtcgcaaaaggcgcggcaaaagagatcaatctattaatcggaacaaaccgtgatgaaggcgtcttgttttttccctctgattcggatcttttgcctgagagcaagatcaacgagattttagaagaatacatgggtaaagaggccgccgaagccgcctcctctctgtatccgaggtcattggaaggccatgttgatatgatgacagatctgatcttttggcatccgtctgttgtgttcgcttcggctcaatcacgatatgcatctgtctttatgtaccggtttgactggcatgcggattcagagcagccgccattcaacaaagctgcgcacggcttagagattccgtttgtatttggaaatatggacattttggaacagctgacaggtacgaaggccggtgaagaagcgcagctgcttgctgaacagatccaggctgcctgggtgtcttttgcccgatccggaaatccgagcaccgatgatgtcagctggcctgattatgatgaagattcacggaaaacgctgatttttgatcaagaggtcgcagttgaaagcgatccttattcagataagagaaagatgttgacagccccgaacccgcagatttagaacaagcggccctgacctgtgtggtcagccgctttgatgatagcgttcgctttgaatggcttcaagcgatttgccgcgcgtttccggcgccatacggagcccgatgatcatatgaatgacgagaaatgcaatcatgacggcgccggctgttttgaagcccaagcccgtaatcatcgccggaacgaccaatgagatgagtccgacgccgatgcggacgatgaagaacatgaagccttgagcgagcgccctgtatttcgtatgaaacagctctgccgcccacagtccgtaaaacgcctgcgctccaaaacccgcagaaatgccccacaggcatacgaataataaaagctccgtgatgttcatcgtgccgaaggtgaggatgacccatgcggcggttgccatagctgctcctatgccaaaaagcaacttccgattgactttatcgccgagacggataaagacgaagtatgtggacgccacagtcaaaatccataaaaatgcctgcagcaggttggcttgtgccgctgttaggccgccgaccgtctcatagatatacggcatgaaatatcccatcgtcccggcaacaaggttccaaaacgcataaattccgatgaggagaatcatcgcgcgaaggttcgctttgttggtcaacagctctttgatcgacgccttttcttcaactccttttgctttgtcttcggcttcttttcgcttttgctcctcccagatggacgattcgtgaatctgctgctgcaaaatccaggtgatgactgcgacgacgaataattgggcaaaaatcaaccggcttcccattaaaccgagcggcgccaaggtaactgataacagcagcgtaagcgccggtccgaccgaccatgccagctgcccccagccgacgcgtccggcccgttcatggtcaggggcctcctcggcaatgtaagtccaagcagccggaattgctgcgcccaccgcaattcccgtcacgatgtatccggttaaaagcatgggaaaattaaacgacgcggcgatcagtaaaacgccaagcatatagactaatagatcgtatttatatatgaattttctcccgtaacggtcgactaaaaaaccgccgagaaaagcgccgatcgccgcgccgaaaccatttgcgcttaaggcgccgagaagtccgacccgggcgtcgtccaatcctaaatattcaacccataacgaaagcccgccggcccccgcgacgatggatcccgcctccaaatagttggacatggcgaccgtaatcgtcgacttcaaactgcctttttttctccctggcatgattcgttcccctttcaaatcagaattcttttctgacagaagccggattgatgcgttgaatgctcgattttaccctagcgagtcatgcaaaattgtaagcgttatcatctcgtggtaatcccgaccctgcatccgttccagccttcaggctgttccgaatgttttgcttatagtattactttattcggaaaacaaaaataaatcaacataaaaatcagaatattccgtctgaatatttttgtttttgtttggattttttctcgaaaaactgccattatatcaattttttattaaaaaaccgaaacttttcctctggaaaatagtatatttaaactaagtatattttactataaggaggaatttcttagatgagtatattaagcaggttcaaagacattatggccagcaatattaacgctttgctggataaagcggagaacacggaaaaaatggtggatcagtatgtcaggaacttaaacagcgacttaaacaaagtaaaggcggaaacggcgtccgtcatggcggccgagcaaagggcaaaaagagaactggcggattgccgggcggaaatcgacaagcttgagcgctatgcaatgaaggctttggaagccggcagcgaggcggatgcccgaacatttttagaaaagaaagcggtgcttgaaacgaaggcatccgagttagaaactgcgtttcaaacggcgtcatccaatgcgaatcaaatgaaaaaaatgcacgataagctcgtttccgatatcggggagcttgaagcgcgccgcgccgcgatcaaagcgaaatggacagcggcgaaaacacaggaaagaatgaataaactcggtgcatctgcagcgaatgccaaccattcaatgtccgctttcggcagaatggaagaaaaggcaaaccgggcgcttgatgaagcgaatgcgatggctgaattgaacgccgctcctcaagatgacatagaagacctgaaggctaaatatgacagcccttctaatgtggatgatgcgcttgccgcattgaaagcgaaaatggcgagtcaaaagtcatatcatttgaaatgaataaagtgagaggttaagagacatggtaatttcttataaatgtccgggctgcggggatgacatggcctttgacgctgaatcgggcacgctcgcctgccgcagctgcgggagacaggacaagattgaaaacattccggaagaattgaaaactgcgagatttactgaagatgaagcaacagaatatcattgccaaaactgcggcgctattttgatcactgagaaagaaacgacggctacatcctgcagcttttgcggaggagcggcagtgatcgccgaccgcctgtccggaagccttgctccggcaaaggtcattccttttacgatcagcaaagaggaggcggcggacgcgtttcgcaagtggtgcagaaaagggctgctcacaccaaagggctttatgtcggctgaccggattaaaagcattacaggcatgtacgtccctttctggatgtacgatttaaacagcaaagtgcaggtcagcgcccgctgcacaaaggtacataggtatatacagggcgactatatctacacggagaccgaacattatgatgcgtttcgcgatatcaatctcgactacatcaaagtcccggtggatgcctcagaaaagatgaacgatcaattgatggacaaattggagccatatccatatgatcagctgaaagattttaaaacggcctatttggcaggctacatcgctgaaaaatataattacgatgatgaagagctttttccgcgggcgaaaagcaaaatcagcggctacatcgagtcatatatcgattccaccctgtccgggtacagctcagtcgatgtgaaaacgaaacacgtcgatacacaaaaagtgaaaagcttttatgtgcttttgcccgtctggatggtcaattacaactacaaacaaaaggattacatctttgccatgaacggacaaacgggaaaagtcgtcggcaagccgccgatcagctcatttaaagaaaaaatgtggttcagcgggctggccgtctccatatttgcactctggaaaatcattgctgctgtaatgggaggcggggcgtgatgagaagtttattgagaagcgcgatgatcttatgtatgattttccttgtcttcatccctatagcctccggtgcggcagcctctgaacagaagcggtttgtttatgatgaagccgggcttctgaccaaacaggaaatcgagaagctggaaacgctggcagccaaattgggcgccgaacgggagaccgactttatcattgtgacgaccaatgatacaaacggccgcgatgtaaagaaatatgcggaggacttctatgacgaaaaagcgcccggctaccagaagaagcacggaaatgcagccgtattaacggtagatatggagcatagagaagtctatcttgccggctttaaaaaggctgaagaatatttgaatgacgccaggctggacaaaattagagaaaaaatcacgccggatatatccgacaagcattatgaggccgcattcgaaatgtttatgaaggcggcgcatgatgatatggagaagaaaccgtgggcggacagcatcttttttaagacgtggtttcaattgcttgtttcggcagtcatcgcgggaattgccgtcgccattatgaaatacaattcaggcggcaaagtgacagtaagtgcaagcacttatatgaacggtgatacgtccggagtgatcagaaataatgacgaatacatcagaacgaccgtcacaaaacagagaaaaccgtccaataataaaagctcaggcggcggaacgacgagcggaggccattcgcacagcggcagccggggaagcttttagaaagggaaaggaagagcttaaatggtgttttttagaaatcaatttgcaaatgtagtagagtgggatgaatttcgcgatgatatgattttctataaatggaacaaccgcgaaatcaaaaaggggagccggctgatcattcgccccggtcaggatgccgtctttttaaacaacggaaaaattgaaggcattttccaggatgagggtgactatgatattgaatccgaaattattccttttttatccactttaaaaggttttaaatttggctttaacagcgggatgcgcgccgaagtcctgtttgtcaacacgaaggaatttaccgtcaagtgggggacgaagaatgccatcaatatcccggctgcaggacttccgggcggcatgccgatcagggcgaacggaacatttaactttaaggtgaatgattatgtcgcattaatcgataaaattgccggtgtgaaagatcagtatgttgtggaagatatcaaaatacggatcacatccattctcgatcagcttctgatgaagtggatcacaaaagaaggaaaagatatgttcaaccttcaagccaacgcctttgatatcgcaaagggaatcaaggaagatcttgatatggagattgtcggcgacggcatgacgataacaggctttaacatcatgagtttcaattatccgaaagaagtccaggacatgatcacgaaaaacgcttcccacggcatggtcggcgatctgaacagatatcagcagatttcaatgacagacggcatggcttcaggaaagatgacaggcggcggtgccgcatctgacatggccggcatgatgatggggatgaacgtggcgaaccaaatgatgaatcagatgaaccaaaatcagcaggcgcaaacacagacgccaccaagcgcgccgcagccagcggcaaaaccgaacttctgtccaaactgcggaacgaaaacgggcgaagccaatttctgtccgaactgcggtcagaagctagtgtaagcggggggatcggttgatgccggcaaagttggtatcttctatgtgaatgagggctttcgctgccggcacgatcgccggcataccaagccggaaactgatggaacagaagctgatcctgatacacaagtcggattaattgcgtgatcagagcgcccgccgtattctatatataacaatgatgtcggatgaaaagaatgcggcatacatcaatcaaggatgtacagaataatcaaaggaaacaatctggaggaaaagcgacatggaattaggcatcagcacctttgtagaaacgacccctgatatcaaaaccggaaaagtcatcagccatgcggagcggctgcgcgaagtagtggaggagatcgtccttgccgatcaggtgggcttggatgtattcggagttggagagcatcatcgtcaagattacgcagcttcttctcctgccgtcgtcctggccgcagcagcttcacagacgaagcgcatcagattaacgagcgcggtcaccgtgctgtcgtcggctgatcccgtccgtgtttttcaggattttgcgacgctcgacgggatttcaaacggcagggcggaaatcatggcgggcagggggtctttcatcgaatcctttccgctgtttggatatgatttagacgattatgatgagctctttgaagaaaagcttgatttgctgctcgaactgcaaaagtcggaaagggtcacatggagcggcaagcatcgcccggctattcacagtacaggcgtttacccgcgtcccgtgcagaagccgctgcctgtatggatcggaagcggcggaaaccaggaatccgtcgttcgcgccggcctgctcggcctgccgctggttctcgcgatcatcggcgggagtccgcagcactttgccccgcttgttgagctttattacaaagcagcggaacatgcagggcatgacgcctcaaagctgattgtcgcttcccattcccacggctttatcgcggaggataccgagacggccgccgatcgttttttcccttccacccagcaggccatgaatacgctcgcaagagagcggggctgggggccgtacagccggtcgagcttcgatgcagccagaagctttgaaggggcgctctatgtaggcgatcctgagacggtggcggaaaaaattattcatctgcgcaagaatgtcgggatcacccgatttttgcttcacgttccggtcggttcgatgccgcacgaagatgtcatgaaggcgattgaactttttggaacaaaaacggcgccgctcgtcagggaagaagtatcccgctgggaggcatccgaaaggtcataacatgaaaggcccgcgctttagcgcaggcctttttatttcatataatgctttttaaaatccggatgtatcgaaaatttgcggcgcaaatggatcaggttttcgccgaaactttcctccaatacctctctgtgcttctccatgatttccatcaggtacaaatcatgaatcatcacttcggtaatcggcatcaccaagcctacatgcatcgtccaggctgcgcggctgtctttcccatgcgagacaatgccggccacaacttctgaatcgtcgacgctgaatacgagccagcgtccgtcatactcttctgtaatttgcctgctgttgtcatgtagatagacattggcgaaatccgcttcaatgtcgccgtatgcaataatggtcacaatgacgcctttttttgcggcccgcttgagctcaggctccaattcaggaaaatcctctttccaaatttccaggagaatcctttttccggccgatgatatgcacgcctttactttatcgagaatctcgcttcgcccggtgatgttccaaatattttcccggtcatttgcagtgcgctcaaacttctcgaaatatttttctgcctgttcaaaagtctcttccgctttcatccgccggtttttaatcaggtccttggcgggaacgggaatgtactgcggtgtgttgccgtagctgacaaatatatcgccgcggattacaaggctctccagcacttcgtatattttcgaccggggaacacccgatttttttgccaccgcatagcctgtcagcggcgattcttccaagagcgccaagtatgctttcgattcatactcggtgaaattcaggtttttcagtacgtctaatatgttttccttcataagccctccagcttcaacaagagtcgctacctttgtcactcatattttgctggatgtattgatttatttcaagtccgctgatacactttttataagtggttacttgagtagtcactatataaaaacagtattggggggagacatctgatggatagcctgctgtcatacatatcgattgcagccatgatggtggtgatacccggagccgatacgatgcttgtggtgaaaaacacgcttcgatacggtccgaacgccgggcgctgcaatgttctcggcttggcgacggggctttctttctggacgctgattgccgttctcggcttagcggtggtgattgcgaaatcggtgattctgttcaatacgatcaaatacttgggggcggcctatttaatatatttaggcattaaaagctttttcgcgaaaaaaatgttttctttggaagagatacaagccgagaagaacaaaaacgaaaacgcatcaagccggcattataaggattcttttatgcaaggattgttcagcaacattctgaatccgaaaactgttttggtctatatcacgattatgcctcaatttattaacttaagagaaagcgtcaaccagcagttgatcatcctcgctttaatccttacttttcttgctgtgttttggttcctcatcctcgtatatttgatcgatttcgcaaagaaatggctgagaagcgtgaaattccagaagatctttcaaaaagctgcgggtctggtgcttgtcggatttggcgttaaaacgggtttagattgatattggagaacgagtgagcgctttggctcactttttttgtttatttgtcaacgattatttgatagaaaacactagatgaaataagagtgctatggttattcgttgacattttgacaacgattctatatatttataccgacttggtctttgggctgatagattgatacatttttagcgtgggaggagaaaagctcgtggatgaacaaaagaaaaatcagctgggagtgctgctgaaagagcagttgcgaaaacgatcattatctttaagagaattgagcgaacgcactcaaatcgataaagcgaccatctcaagaatcatcaatggcaaaagaaaagcaaacctgaaccatttgcaaaggttttcagaaagcctcggcgtttcttttgatgagctgatgacagcggccggctatgcgatggagaagacgcaggaaagcgaacgtccggatattcactcgtcagttgccgaaattgaagatgttttgcaaacctcaaatgtctatgatcggccatttaccatggaagaactgaaaaacaaattgaatgagtgcgaacaatattctcagacggaggaaggaaagcgtaccattctggctgagtttgaatctaaaatcgagaaagttgccggcattggtccttttctgacccgtctgcacgacatgtacagcagatttacctcggggcgggggacgccgcgtgaattgctgctgatgggcggcgctttgctgtatttcatcgtttctgttgatgtcataccggattatatttttccgatcggctatatcgatgatgcggcagcggttcatttcgttttcaaccagctgtcatataaatcatgatggagcatgttcaagatgaaaagaaagcatatcaacattgacatcagtctgctgctcattctattttgtttgtttatcatcagcctgctggccgtttacagcgggtcgggccagtatgaaacacaggaccctttttattttgccaaacggcaggtcttttggtatcttgtcgggtttggcgtcatggcgggaacggcctacatcgactatgagctgcttgaacgattggcgcttcgtttatttgtgggagccgtttttcttctgattctcgttcatttttttggaacttacaaaaacggttcgcaaaggtggatcagcttcggggtcatcgaaatccagccttcagaatttatgaagatcattttgattcttctgctggcttcgatactcaatcaatttcagcataaaaggttctccttcgccgagagcatcattccaacgggaaaaatcatgatgtacacggtgattccgtttttctttatattggttcagccagatttagggtccgcattggtgattttatcgatcgcattcacgttgatgctggtctcggggatttcgggcaggatgatcgtgtccctgtcacttggattcatggcattggttgcctttttgacgtatttgcacaatcattactttgagatattttcaaagattattaagcctcaccagcttgaccggatatatggctggctcagtcctcatgaacatgcctctacatatggataccagctgacgcaggcgttattagggatcggatcaggccagctgtcagggagcggctttactcaaggaatccaagttcagggagggaaaattccggaggctcatactgattttattttcgccgtgattggtgaggaattcggttttttgggtgccgtaacattagtctgtctgtattttctgatgatctacagaatcatcaggattgcgctttcgtccaacagtctgttcggtctttatatatgtgcgggggttgcagggttgattgtattccaagtgttccaaaatatcgggatgacgatcgagttaatgccgatcacggggctcgctcttccgtttatcagctatggcggcagcgcgctgttgaccaacatgatcgctttaggtctcgttttcagtgtgaatatcagatctaaacattacatgtttgggaatgattggggatgaagttgctcaaaatgattctttcccatctaaagaaacttgattatgtattgattgccgcggttctgtttttatctgcgtttggcttgctgatggtatacagcgccggctaccccctcggatatatgaagtatcatgatggcagctatttttttatgaagcagctgcaatggctgctcatcggtttggcctttttttcggctgccgccattttcccatacaaagcttacagcaaactcattcggtttttggtgaagctttcttttttaatgctgattctcgttttgctgccgggaatcgggatggagaaaaacaattcccaaaggtggattcaattcggttcgctcatgattcagccgtctgaggctgtgaagcttgtgatggttatttatttcgcctatgtgtatgcaaaaaagcagaaatacatcgccgatttcggaaagggcgtcatgccgccgctgctgattttggcggctgtgttttttttgattttaaaacagcctgacttgggcaccgccgtttccatcctgttaagctgcggagcggttctgttgtgcgccggcctcagaatgcggcacttgctgcttctcggaacaatggcaggggctggcatcgcatattttgcaataacagcgccgtaccggttaaaaaggctgacatcgttcagcgatccttttcaaaatgaaaacggagacggctaccagttgatcaattcctaccttgccattgattcgggcgggttatgggggaatggattggggaacagcgttcaaaagctgggatttcttcccgaagcccatacggactttatcatggcggtcatcactgaagaactcggcggtatcgggctggcggtgatcatctgggcttacctgttgatcatgttcagaggggttcggatcgctgtgcaaatcgatgatccgtttggaaagctgctggcggtcggccttactttccagatcatgattcaagcgttatttaacctgggcgctgttttcggccttcttcccattaccggaattcctcttccgtttgtcagctacggaggttcttcgttattgttcatgctgacgacagccgggatattggtcaacctctcatcacatgttaagcggggagttaaaaaagatgtggcctttcttttgtagagagtcttttcttaactttgaagtggagaattttatctcaaagttacgattgttgatcttgtcttctcatatcgaatttgaccgggacgtgtttatacatataaatgcgttcatattgataaataaaggaaatcatgatatattcaaggtgtatgaaacagaataatctctttatatgaatgcataaactaaaaaagaccggaagatgcggcaacatctcccggaagcaacagagaggctccataaaaaggagtcggctctatttttagatcccaattaaaaagtaagatcgtcttggtgtgggaatcaagggcgatcttacttttttttgtcgtttgatgacagaatggccactacgagaatgccgaaagacaccatgagttgcaaggcctctgatactgtcacatgctcaccccctttctcttcaagagatggaggatgagccgaccgcccttatatagaaccgaactgctgccaacccttattataccaaaaagcagagttgtttccataaatgtccgttgacatgcaaatttgaaaaaccgcagttttcttaaaacgttctgcggtcaaactgagtaaatgctgttttttcttagccggaaccctgctcattcctttagcagctgatctagtgcaaaacaggccggttcattaaaacccggcctgtttgaaatatattgttcatttatgcgggacgcgcggcaaaaatttggaaggcaacgccgaacggatcagtgacaatgccgtatgcgggactgaaataagtttccttcagctcaagcttgacctcgccccgctcgctcagcttgccgaaaagccgcttggccgaagaaacatcggctgccgttacgcaaatggacaattggtttccgctttggaaaggcagttcaggaataatgtcggcgatcatcaggacagcgtcgccgattgtcaaaacggcatgtgcgatgaaatccaattcgtcttccttaaagttcgctgcctcatctgcggggccttcaccaatcgtctgactgaactttacttcggcatcgagtacatcacggtaataatcaatcgcttcctttgctcttccattcatcaggatataaggtgtgaatcgcgttttcatagggggaacatctcctttttttgttgatctaaggagattgtatattataatggtgacaactaatgtcgtggttaaaaaataattggaggtattcatgtctaaagcgaaacgattgaatgaaatgatcatgatggtaaaccggaaaaaacgatttacggtcggggagctggcgcgggaattcggggtttcaaagagaacggttttaagggatttgcaagagctcagcgaaatgggggtgcccctctattctgaaaccggcccccacggaggatatcaggtgttaaatgaaaggattcttcctcccatcgccttcagcgagaacgaagcgatctcaatcttctttgcgatcgatgcactgaagcattatatatccctgccgtttgatgcccagtacgcatccatcaaaaagaaattttatttaaacctttcaggagatatccgggatgcgattgacagtatgaaggaccgcgttgctttttatacgccttatgagcaaacagacgacattccggttttaaaggtgctgcttgaggcagcggttcagcaaaaggtgttgatcatcgagtatgaagcaaatggcgcatcaagcaagaggagcattcagccgatcggaatctatgccaatcaagggaagtggtattgcccggcttactgttttttaagaaaggattaccgcatattcaggtgcgaccggatcaagcgggccgagcttgatgaacataaggcaccgattgatttgtccggcctcaatttaaagaaccgtttttcggctttgtcccggccaagggagacattggaattatccgccgagctgacaaaaaagggagtagagcggcacggttcactcaaatggccgcaccttgaactgcatgtaagagaagatgggtccggcgtgctgaaaggcgaaatcgcgccgaaggatatcgatttttttgcggattatttcatttcgttcggccgggaagcggttattcagaagccttccaaattaattgaaaggatgaaacggacattatccgacatgctgaaacaatacggctgaaatgaagactccggtataccgcagcctgcgtttttctgcatttaaagttccgcaaaaaacgcgtgaagacgcatgtcttcttcatcctccagttaaagacactctcaggaatcgagagtgtcttatttttgccgtcagaagaaatttttacccaaaaaagttgacggcagatttaaaagtgagtatcattacaaatatgatattaatattacatttttgttacaaaagaaaatgatatgttacgagtttaaaagaagattgacaaaggagcatgcttatgaaaaaagcgatggctattttaggattccttgtactcacagcatcgctgctatttatcatcaataaaggaacatctcaaataaacgcttcacaaaatagaaaagccgcggttcacacggagtattacaaagacatcagttcgttttcttttccggtattcagcgatttgaaggaagaggatgccaagctggccaacgatgcggtaaaacttcatttaaaaaattcctataaagaatttcaaaaaatcgttaatgatgccgaaaagaaggataaggatgaagaaaacgtttatgaaacgtcctacaaagtcaaatacaacgaggaaggcaaactgagctttttaatctatgactatcagttctccggcggtgcgcacggcatgtacaccgtaacatcctacaactttgactttgacaagcataaacaagtcgtgctgactgacgtattaaacaatcaggcgaaaatcgaaaaggcaaaaaactatattttcagctatatcaacgaacatccggaacagttttattctgatcttaaaaagagcgatatccgtttggatgaacatacggcattctattatacaagcagcggaatttcaattgtatttcagcagtatgatatcgccccgtatgcagccggaaaccaggaaataaagcttccgtcgacgcttttatattagccccggcattagatctaatatttgtaatagaaacagagagagcaagtcatgaaacaggagagtgagcagcgatgtctggcaaaccatcatttcgatgggttaaaatgttgatttttttaacgatattaataggtttggcagggtactcttacaataaagtgtcaagcaacagccaagagccccctcagccaaaaaaagaccgcggacaatccggcctcggcgtcgaatccatggtcaatgacagcaaacaagagaggtatgccatccattatccggtgtttcacataaaagaaatcgatgaacaaataaaagattatgtgaatcaagaattggccggttttaaagaggataacgcaaaggcccaggctcaggatgaagacgggccttttgaactgaacattaaatataaggttgtctattatacaaaggatacggccagtgttgtgctgaatcaatacatagaggccggcggcgtatcgggtacaacatctgtcaagacgtttaacgctgatttaaagcagaaaaagctgctgtcccttcaagatctgtttgaagagaattcagattttctgaacaggatttcaagcattgcctatcaggaattgaaaaatcggaatccgtctgctgacatggctttattaaaagaagggacgagccctcaggaagaacatttcagccgcttcgcgcttcttgaaaacgaggtggaattttattttgagaaaaaacaaaccggtcttgaacagtctgtaaaaataaaaaaagaatgggtaaaagatattttaaaagaccgatatcaggatatgaaaaagaatcgtcttcaggccaaacctgatcaggagcctgttccgcttccgaagcaagcgaaaattaatcccgatgaaaaagtgattgccctcacatttgatgacggtccgaatcccgctacaacgaataaaatattaaacgctttacagaagcatgaagggcatgcgaccttctttgtgcttggaagcagagcgcaatattatcccgaaacgataaaacggatgctgaaggaaggaaacgaagtcggcaaccattcctgggaccatccgttattgacaaggctgtcaaatgaaaaagcgtatcaggagattaacgacacgcaagaaatgatcgaaaaaatcagcggacacctgcctgtacacttgcgtcctccatacggcgggatcaatgattccgtccgctcgctttccaatctgaaggtttcattgtgggatgttgatccggaagattggaagtacaaaaataagcaaaagattgtcaatcatgtcatgagccatgcgggagacggaaaaatcgtcttaatgcacgatatttatgcaacgtccgcagatgctgctgaagagattattaaaaagctgaaagcaaaaggctatcaattggtaactgtatctcagcttgaagaagtgaagaagcagagaggctattgaataaatgagtagaaagcgccatatcggcgcttttcttttggaagaaaatatagggaaaatggtatttgttaaaaattcggaatatttatacaatatcatatgtttcacattgaaaggggaggagaatcatgaaacaacaaaaacggctttacgcccgattgctgccgctgttatttgcgctcatcttcttgctgcctcattctgcagcagcggcggcaaatcttaaagggacgctgatgcagtattttgaatggtacatgcccaatgacggccaacattggaagcgcttgcaaaacgactcggcatatttggctgaacacggtattactgccgtctggattcccccggcatataagggaacgagccaagcggatgtgggctacggtgcttacgacctttatgatttaggggagtttcatcaaaaagggacggttcggacaaagtacggcacaaaaggagagctgcaatctgcgatcaaaagtcttcattcccgcgacattaacgtttacggggatgtggtcatcaaccacaaaggcggcgctgatgcgaccgaagatgtaaccgcggttgaagtcgatcccgctgaccgcaaccgcgtaatttcaggagaacaccgaattaaagcctggacacattttcattttccggggcgcggcagcacatacagcgattttaaatggcattggtaccattttgacggaaccgattgggacgagtcccgaaagctgaaccgcatctataagtttcaaggaaaggcttgggattgggaagtttccaatgaaaacggcaactatgattatttgatgtatgccgacatcgattatgaccatcctgatgtcgcagcagaaattaagagatggggcacttggtatgccaatgaactgcaattggacggtttccgtcttgatgctgtcaaacacattaaattttcttttttgcgggattgggttaatcatgtcagggaaaaaacggggaaggaaatgtttacggtagctgaatattggcagaatgacttgggcgcgctggaaaactatttgaacaaaacaaattttaatcattcagtgtttgacgtgccgcttcattatcagttccatgctgcatcgacacagggaggcggctatgatatgaggaaattgctgaacggtacggtcgtttccaagcatccgttgaaagcggttacatttgtcgataaccatgatacacagccggggcaatcgcttgagtcgactgtccaaacatggtttaagccgcttgcttacgcttttattctcacaagggaatctggataccctcaggttttctacggggatatgtacgggacgaaaggagactcccagcgcgaaattcctgccttgaaacacaaaattgaaccgatcttaaaagcgagaaaacagtatgcgtacggagcacagcatgattatttcgaccaccatgacattgtcggctggacaagggaaggcgacagctcggttgcaaattcaggtttggcggcattaataacagacggacccggtggggcaaagcgaatgtatgtcggccggcaaaacgccggtgagacatggcatgacattaccggaaaccgttcggagccggttgtcatcaattcggaaggctggggagagtttcacgtaaacggcgggtcggtttcaatttatgttcaaagatagaagagcagagaggacggatttcctgaaggaaatccgtttttttattttgcccgtcttataaatttctttgattacattttataattaattttaacaaagtgtcatcagccctcaggaaggacttgctgacagtttgaatcgcataggtaaggcggggatgaaatggcaacgttatctgatgtagcaaagaaagcaaatgtgtcgaaaatgacggtatcgcgggtgatcaatcatcctgagactgtgacggatgaattgaaaaagcttgttcattccgcaatgaaggagctcaattatataccgaactatgcagcaagagcgctcgttcaaaacagaacacaggtcgtcaagctgctcatactggaagaaatggatacaacagaaccttattatatgaatctgttaacgggaatcagccgcgagctggaccgtcatcattatgctttgcagcttgtcacaaggaaatctctcaatatcggccagtgcgacggcattattgcgacggggttgagaaaagccgattttgaagggctcatcaaggtttttgaaaagcctgtcgttgtattcgggcaaaatgaaatgggctacgattttattgatgttaacaatgaaaaaggaacctatatggcaacacgtcacgtcattggtctgggcgtccgcaatgtcgtcttttttgggatcgatttggatgagccctttgaacggtcaagggaaaaaggctaccttcaggcgatggaaggcagtctgaaaaaagcagcgattttccggatggaaaacagttcaaaaaaaagtgaagcacgcgcgcgggaagtgcttgcatcctttgacgcacctgcagcggttgtttgcgcttcggaccgaatcgcgctcggggttatccgcgcggtgcaatcgcttggtaaaagaattccggaagatgtcgcggtcaccggctatgacggggtgtttctcgaccggatcgcttcgcctcgcctgacaaccgtcagacagcctgttgttgaaatgggagaggcttgcgcgagaatcctgctgaaaaaaatcaatgaagacggagcgccgcaaggcaatcaattttttgagccggagcttattgtccgcgaatcgactttgtagggtgtctcattctgttaccgttaacagctgaaaatgattgttcctgttaccgccgtcatgataatttcagaataaaagccggtttatcacagccggacaaccaaaagggggaaacatgatggaatatgcagcgatacatcatcagcctttcagctctgatgcctattcttacaatggacggacattgcacatcaagatccgtacaaaaaaggatgatgccgaacacgtccgcttggtttggggcgatccttacgaatacaccggcggcacatggaaagcgaacgagcttgcgatggcgaaaattgccgcaacaagcacccatgattactggtttgccgaagtggcgcctccattcaggcgtctgcaatacggatttatcctgacaggcgctgatgatcgagacactttttacggaagcaatggtgcatgtccgtttgccgggaaagcggcggatataggcaaacactgttttaaatttccgtttgttcatgaggcagacacgtttgatgcacctgactgggtcaaatcaaccgtctggtatcaaatttttccggagcgctttgccagcgggcgggaagatttgtctccggaaaacgctttgccatggggaagcaaagatcctgaggcgcacgattttttcggaggggatttgcaggggatcatggacaagctggactatttggaagacttgggggtaggcggaatctatttgacgccgatctttgccgcgccttccaaccataaatacgacacattggactattgctccatcgatccgcattttggcgatgaggagctctttcgcacgctggtcagccggattcacgagcggggaatgaaaatcatgcttgatgctgtttttaaccacattggcagcgcttcgcaagagtggcaggatgttgtcaaaaacggtgaaacgtcccgctataaagactggttccatattcattctttccctgttaaagaaggcagctatgatacatttgcgtttactcccgagatgccgaagctcaatacggccaacccggaagttcaggcttatttgcttgatattgcgctgtactggatccgcgaatttgatatcgacggctggcgtttggatgtggcaaatgaagttgatcatgcgttttggaagaaattccggcaagccgtcacggcagaaaagcccgacatttttatattgggcgaaatctggcatcaggctgatccgtggcttagaggagacgaatttcattcggtcatgaactacccgttcacagaaccgatgattgactattttgcagacggatcgatttcagcttcgcaaatggccagccgcatcaattcgcatttaatgagcgggatgaagcaggtcaatgaggtgatgtttaatttgctggacagtcatgacacgaagcggattttgacaagatgcggaggagatgacaaaaaggtgcgctctcttttggcattcatgtttgctcagacaggctcgccgtgcatttattacggaacggaagtcgggcttgacggcggcgatgatccattgtgccggaagtgcatggtttgggaagaggaaaaacagaatcaagagatgctcgcatttatgaaacggctgatcgctttgcgaaaacaagagaatgatgtattgacttatggcgcgcttgagtggaagctggttgatgaccaaaacgattttgtcagtttttctcgaacgcatgaaggaaaagagctgatctacttcttccaccagggcagcgaggtgcgccgtgtcagattgcgggatttgaagattgcaagcgataaaagaatatacgatgcgtggacggaagaagcgcttcagcatgatgatgtggtcgacattcagccaggcggatttttcattttgggggcggtctaaattctgttaccggtaacaggtttaaaactattgtaaccgctttctgtcgaggattacaattgtctcagattccaagatagaagggggaaaaaagatgcaacatttaaaaaaaggaattttagtgctgctggcgtcagttctgctgttcggtcttgccgcctgttcaagttcaaaggaaacgggaggcagcggcgggaaaaaagtgctgaccgtgtctgtagaagaggtctataaaccttacgtcgaaagcataaaggaaggttttgaaaaagagaatgatgtgacagtcaaaatcgttgaaaagccgatgttcgaccagcttgaagcgcttccgcttgacggtccggcaggcaatgcgcccgatgtcatgcttgcggcatacgaccgtatcggcggcttaggacagcaaggtcatttgctggaagtcaaaccgtctgacacaaaaagcttcggagacaaagaaatgcagcaggtgacggttggcggaaaagtctatggaatcccgcttgttattgaaactctcgtactctattacaacaaagacctgttaaaaacgccgccaaaaacttttaacgagctcgaggatttaacaaaagacaagaggttcgctttttcttcggaaaaaggaaaatcgaccgcctttcttgcaaaatggacggacttttacatgtcatacggtttaatggccggatacggcggatatgtattcggagctgacggcacggattccggagacatcggtctgaacaacaagggagccgtagaggcggtggaatacgccgaaaaatggtttagtgaatattggccgaaaggcatgcaggacaatacgagcgcagacgattttatccagcagacctttatggacggaaaagcagcggctgttatcggaggtccttggtcggcttccaattataaagaagccggtttgaactacggcgcagcgaaaatcccgacattgccgaacggaaaagagtatgccccgtttgcaggcggaaaaggctgggtcgcctcaaaatatacgaaagagccggagcttgctgagaaatggcttcaatatgccgcaaatgacgaaaacgcttaccgcttttatgaagatacgaacgaagttccggccaacctcgctgctcgaaagaaagcaggggagcaaaaaagcgagctgacgtcggcggtcatcacacaatacgaaacggcgactccaactccgaatattccggaaatggccgaagtgtggacaggtgcagaaagcttgatatttgacgcggcagcagggaaaaaatcggctcagcaatcagcggatgatgccgtgcgcgtgatcaaagaaaacattaaagaaaagtatgtgaaataaaacggcggttttagcgtccggaagaatagagggcgaaaaaaatgaacaaagaccaaacactagcaaaccggagccggaaggcagcgctgttatcgataattcccggtgctggccagattgcaaaccggcagttttcaaaggggatcctttttctagtcatcacaggcttgtttatttgtgagttagcgattttcggttatcaggcgctgatcggtctcgtgacgctggggactgtccccggagaagaccactcgctgtttctcttgatagagggcacgctgcaattgattttgacgctcgttttcttgatgttttacatctttaatctgtatgatgcccggaagaccgccgcgatgaaggcggcgggtttgaaaatcagcgagacggctggggacatgatcagaaatgcaggtgacaaagggtttccgtatttatttacgctgccggcatatctcatgatggtgtttgtgattatttttccggtgctggtgactctgtttatcgcgtttacaaactacgatttttatcatattccgccaaacagtctcatcgactgggtcggctttaaaaatttcatgaatatctttttccttggctcgtatcggcaaacattcgccgatgtgctgggctggacgatcatctggacgatctgtgcgacgacgctgcaaattgttctcggcatcgtgacggcgctgatcgtcaatcagaactttattaaaggcaagcggatgttccggatcatcttcctgcttccgtgggccgttccggcatttattacgattatgagcttcgccaacattttcaacgactcggcgggcgcgatgaacgtccaggtgatcccgcttttgaaccagcttccgttcgtcgacatcccggctgtcgcatggaagaccgatccgttctggacgaagacggctttgattatgatccagacgtggctcggttttccctacatttatgtcatggtgacgggggtgcttcaggcgattcccggagagctttatgaagcggcaaagattgacggcgcgacatttattcagcgctttaaacacattacgctgccgatgattttatttgcgaccgcaccggtgatgattacccagtatacatttaatttcaataacttctcgatcatctatttatttaatgaaggcggtccggggagtgcgggggccggagccgggtcaaccgacatcttaatatcctggatctataagctgacgacggggacgtcgccgcagtattccgtggcggctgctgtcacactgctcatttctttcattgtcatcggggtttccctgattgcttttaagaaatcgaatgcctttggcaatgaggaggtcatgtagatgagagggctttttaaaaatacgcggttcaccgggatgctgaacaaggttttgacctatatatttttggcgtttttaagcatcgtgattatttatccgcttttgatcacagcatcatccgcattccgggtcgggaatgtagcggcttttacactcgatttttcgggcgcatggacattggaccactttaagcggctgtttgaagagacgctttacctcaattggtacgggaatacacttgtgatcgctctgtctgtcatggtgttccaggtgacgattgtgacgcttgccggctatacgtacagccgctaccggtttgcgggccgaaaaaagagcctcattttctttttgatcattcaaatggtgccgacgatggcggcgctgaccgctttttacgtcctggccatgctgatcggagctttggaccaatattggtttttaactgcaatctatatcggcggcggaattccgatgaacacatggctgatgaagggctactttgatacagtgccgagagaaatcgatgaagcggcgcgaattgatggagcggggcacctgcggatctttgcttcggtcgttctcccgcttgtgaaaccgatgcttgcagtccaggcgctgtgggcgtttatggggccgttcggcgactatctgctggcgaaatttctgcttcggtcgccggaaagcctgaccatcgccgtcggtttgcagacattcatctccaatccgcagcagcaaaaagtcgcgctgtttgcagctggggcgattcttgcagctctgccgatttgcatcttgttcttctttctccaaaagaactttgtgtccggtttgacatccggcggaacgaagggataaatcgatgaacgacatgcgaaacgaaaagctgatcgtccgatttcttaaagcagcggcatcaccggcgggcgtcatgcgctgcaaacatgcattcagctggctcgaaatttcttttctgtttatgtttttgactgcttgtttaatggcgcctatgacccttgcgtttatgaaaatggaccgcttcaatgccgggtatctgatcccgaacgtcgctcaagaggctgacgcggcattcatcaaacaattaaaaggctaccaattgacaaacggaagattgaagggcgaagacgagctgtaccgtgtggagaaagggagaaccctgctggccgtcgatttgaaggatgaattaaaaacaagcggtgagaacgggcggataaaagcggaaggctatcaaaatgcgctcatctttcagtcagatcatctgatcatcagtgatcaaagcggagcggggttttccgttcgctatccggcaaaggctgggctgaatgatctggatgccggtcatttgggggattttatcggtgcaatgtggtttgcccaatataagccgcttatcatcatgctggcctgttcggcggttttcatcatctcgctttttttaacggccgttctggcgggaggcatctggatctccaaaaaatccaacatgaccgggataaggtcgtttaaggaagcggccgcagcggcggtgtgcggatcggcgcttccggcaggagccgcaatggctttcggtatgatcagctttgacttcatcgcgatgctgctcatccattcgtgcggtagtgctttgatggtctctttcattttcaggcacatcttcaagaaccgccatcacaacgaaaatctacagtcaggaggaaatcatggcaaatcagcggctatttgagatcgaccagtggaaaatcaaaacaaacaaatttgaaaaggaacataaacggcttcaggaaagtctgacatccttggcgaacggatatatgggaatcagggggaattttgaagaaagctattcaggcgaaagtctcaaaggcacatatatcgcaggggtttggttccctgacaaaacgcgtgtcggctggtggaaaaacggctatcccgaatatttcgggaaagtgatcaatgcgatgaatttcatcggaattgatgtatatgtagacgacgaaaaagtcgacctcagccaaaacgacatcgaatcgtttgaattggagcttaatatgaaagaaggcatcttgcggagaagcgctgtcgtccgtgtgaatcaaaaggctgtcaaaatttcgtccgagcgctttcttagcctcgatgtcccgcaactgtgcgcgatccattatgaagcggaatgcctgagcgatgaagcggtcatcacgcttgttccttatcttgatggaaatgtcgcaaatgaggatgccaatttcgaagagcggttttggcaggaagaagcgaaaggcgccgaatctcatcgcggccatcttgtgacgaaaacgattgagaatccgtttggaaccccgcgttttacggtggctgcttctatgtgcaatgtgacggaaggatatgtcagcgagcattttcaaacggatgcaatgtacgcggaaaaccgctactgttacgaagtgggaccgggaacaaaggcttctttaaagaaattgatcattgtcacaacgtcccgggattttgaagaagcagagcttttagtacagggcagggcgcttttggcggatgttcttcggcagggatatgaagaagcgaagcggaggcataccgaacattggatggaaaggtgggcaaaagcggacattgaaattaaaggggatgatgagcttcagcagggcatccggtacaacctctttcagctcttctcgacatactacggagccgattcacgcttaaacatcgggccgaaaggatttaccggcgagaaatacggaggagccgcctattgggatactgaggcgtacgccgttccgatgtatttggcgacggcagagccggaggtgacgaagaatctgcttttgtaccgctatcatcatttggaggcagcaaaacggaatgccgccaaactggggctgaaaggagccctttatccgatggtcaccttcacaggcgatgaatgccacaatgaatgggagatcaccttcgaagaaattcaccgcaacggcgcgatctgttatgcgatctacaattatgtcaattatacaggcgaccgggactacatgaaagaatacgggatagacgttctcgtcgaaatcagcagattttgggcggaccgcgtccacttctcaaaacgaaacaataaatacatgatccacggcgtcacagggccgaatgaatatgaaaacaatgtcaacaacaactggtatacgaacttgattgcgtcatggacgcttgagtacacgctcgaaaacctcgctatcctcccggaggaaaaacgccgccggcttgatgtacgggaagccgaaatcgagaaatggaaggatatcatcgagcgaatgtactatccatacagtgaggaattaaatgtttttattcagcatgatactttcctggataaagagcttcaggcagcggatgagcttgaaccgggtgaccgtccgctctatcagaactggtcatgggataaaattctccgctccagttttattaagcaggctgatgttctgcaaggcatttatttctttaatcaccgatttacaatggaagaaaaacgtcgcaactttgaattttatgaaccgatgacagttcatgaatcgagcctttcgccatctgtccatgcggtgctggcggctgagctcaaaatggaaaagaaagcgctcgaactgtataagcgtacagcgaggcttgatctggataattacaatcatgacaccgaggaagggcttcatatcacttcgatgaccggaagctggctcgccatcgtgcaaggatttgccggcatgcgcactcaggatgagaagctgtcttttgctccgtttctgccgaaggaatgggacggttattcgttcaacatcaattatcgagaccggctaatcaatgtgcaggtagaggaaaacagcgtcgttttcagtcttttaaaaggagaaccgctttctatgacagtttatggagaacagatcgcactgaacggacggtatgaaaggaggatggcccgatgagccaatggtggaaagaggcagtcgtgtatcaaatttacccgcggagtttttatgattccaacggagacggcttcggtgatttgcagggggtgattcaaaagctcgattacatcaaaagccttggagccgatgtcatatggctgtgtcctgtgtttgattccccgcaggatgacaacggctacgacatcagcgactatagaagcatatacgaaaagttcgggacgaacgatgatatgtttcaattgattgatgaagtgcataaacgcggaatgaaaatcattatggatcttgtcgtgaatcacacgtctgatgaacatgcctggtttgccgaaagccgcaagtcaaaggacaatccttaccgtgattattatttttggaaggatccaaaggcggacggttcagagccgaacaattggggatcgatcttttcagggccggcatggacgctcgatgagcggacaggacagtattatcttcactacttttcgaaaaagcagcctgacttaaactgggagaatgaagcggttcgccgcgaagtatacgatttgatgacattttggatggacagaggcgtggacggctggcggatggacgtgatcggttccatctccaaattcgtcgactttcccgattatgaaacagatgacagccgtccatatgtcgtcggccgctatcattcgaacggcccccgtctgcacgaatttatacaagagatgaaccgggaagtgctgtcccgttacgactgtatgacggtcggcgaagcaaacggctcagatgttgaagaagcgaaaaaatacacggatccaagcagacatgagctgaacatgatttttacatttgaacatatggatattgataccaaacagcattctccgaatgggaaatggcagatgaagccgtttgacccgatcgctttaaaaaagacgatgacgaggtggcagaccgctttaatgaatgtcggctggaatacgctttatttcgaaaatcatgatcagccgagggtcatatcccgctggggcaatgaccgcgagctccgcaaacaatgcgccaaagcatttgcaacagttctgcacggcatgaagggaaccccgttcatttatcaaggtgaagaaatcggcatgacaaacagcgagatgccgctcgaaatgtatgatgatctcgaaatcaaaaacgcataccgcgaacttgtcattgaaaacaaaacgatgacagaggaagactttcgaaaagccgtggcgaaaaaagggcgggatcatgcgagaacgccgatgcaatgggatgacgggaaatacgcgggctttacggatggagagccttggctggcggtaaatccccgctatcaagaaatcaatgtgaaagagtcgcttgccgatgaagattcgattttctattattatcagaagctcatcgggctgcgcaaacaaaataaagtcatcgtgtacggagactatcggctgctgctcgaggaagatccgcgaatctttgcgtatatccgcgaatatcggggcgaaaagctgttagtcgccgtgaatttatcagaagaaaaggcgctgtttcatgcttcgccggaattgcttgaggacagatgggatgtgctgttgtcaaactacgcccgagagcggcttaatataagcggcagtatcgacatggagccttatgaagctttcatgatgatcagccgggcaaaggattacacatcatgaaagcggtcatttttgacttggacggcgtgatcacggatacggccgagtatcattatctcgcatggaaacatactgcagaacaaatcggcattgagattgaccggagctttaatgaacggctgaaaggcatcaacagagagcagtcgcttgataagattttgattcacggcggcgcggccggaaagtttcaggaggcggagaaacaagagatcatgcgccggaaaaatcaatactaccaacagctgatccaaaacttgactccgcacgacctgctgccgggaatctccgtgctttttgccgaattgaaaagagaacatataagcattgcgttagcttcgtcaagccgaaacgcgcctgctattttgcagcggctcggtgtcatggacgaatttcagggtgtcgttgatccggccgcacttgctcacggaaagcccgaccccgaaatctttttgacggccgctgcactgctcggtgtgcctccgtctgaatgtgcagcaatcgaagatgctgaagccgggatcgccgcgatcaaatccgcagggatgttcgcggtgggagtcggtgatgagacatcgctgcgcggagccgatttgatcgtgcacaacacaaacgagctgacgtttgagctgctgaatgaaggatggcagcgctattgctgtataagagaaggaaaatgaaaagcaacccgagaatcataaaatgacaggccgccgctggcggccttatctgcaatcggagagggaagcaaaaccaagaacaagatcaagatcaaggcgttcggctggccggagagggagaccgttcagatatgcgttttgctggttatacaaccgatctcagcaacccgacttcgaatctatcaggcggttggatacagtcctgttgcagagtctatcgcctgcgtttttcaagaaaaacagcctaatcgatccctttaaaaggatgattaggctgtttgtttattggtgcatttgcaatttgacaaattttcgtttgccgacttggatgatcatgccgtgttcgagtgcaatgtccgcatgaatcgattccgctttggcgccgttgattttaacgccgccgttttggatcatgcggcgggcttcacttttggaaggaaggagttcgagcgtcaccaataaatcggtgaccggcaccgttccgccaccttgccagtgtacggctgttatattgtccggcgcgctgttttgctgaaaaactttcttaaactgctgttcggccgcttctgccgccttgcttccatgatacatgttgacaatggttttcccgagaagcatcttcgcgtctctcggatgaacggcccccgtttccaaatccttgacaagacgttttttttcttccgcctccaagtcggtcgcaagatggatatactttttcatcaaactgtccggcagagacatcgttttcccgaacatttcatgagggtcttcatcgatgccgatgtaattgttctttgatttagacattttttcaatgccgtcaagcccttcaagcagcggcatgagaatgacgacctgtttttcttttccgtacttttcctgaaagtgtctgcccatgagcacgttaaaatgctgatccgttccgcccagttcgatgtcgctgtccagaacgactgaatcatacccctgcatcaacgggtaaaagaactcatgaagcgaaatcggcttttgcatggcgattctttcttcaaaatcatcgcgttccattaaacgggcgacggtaattttgcccgcgagctcaatgacgtcttccaaggttaatcgtttaagccattttgagttgtagtgaagctcgaccttgttctgatcaagcacttttccaaactgttgaaagtatgtttcggcattgcggcggacctcttcgtccgtcagctgtttcctggcggcggattttcctgttggatcaccgattttccccgtgaaatcgccgatcaggagctggacgatatgtccgttttcctgaaactgacgaagcttattcaagacgacggtgtggcccaaatgtacgtcaggcgcagacggatcgaggccgagcttaattttcagcggttcgccggtcaaaatcgatttggccagctttgcccgcagttcctccgggggaatgacctcctccgctccgtccatatataagtgaagctgcctttcgacttcccgcttttcggcagttgtcagttgatcaaattgttgttgctgcatgataactcctcctttttttgtataaaaaaagaacctcatcccgataagggacgtggctcaaatgcacgcggtaccaccctgattgaagaccttcatcttccgctcaatttccggtaacggcttcccgttctttgctacttgaaggttcacaaagaaagctcagggaggtaattcacgtctgcctttgtaccggctcgcaccagccgccggctctctggaacagggagacagtccgctactcgttcccgtcgttgcttatggtttatgaagattgtcattcacttttcgaaggagctcgatcaatgtattctgctcctcttttgtcatgcccttgatcagcattgtttcccctttgtggaacgccggataaagctcttcaatcgcggcttttccttccggtgtgatctcggcgtaaacgtgtctgcggtctctcggatccgcgcttttgacgcaaaagttctttttctcaagcgttttaatgacattgctcgcagtggctgttgaaattcctgacagttcggcgagttttctcgtttcaagcctgccccatacccatagatcgtaaagaatcgaaaaagccgtccaagacaattgatatgaggaaaggacctcggtctccattttgacgcggagcttttgcgccgaccggtaaaggttggtggcgaccgaaatggcttcaagattcaaggattcgatcggcatgcgcttcagcttgctgagggtgtcgtgttcttcctgtcgaagatggggggatctattcaatcgtgacgcctgcctttttattttcagaattattagctatgaaatgaattttaacagacggtctccatcaatgcaagcccttgtttgacatgatgagaaaagccggcatcatgatgatgaccggcgcttgtttcagctattttttggtgatctgtttgcggcgcacttcaattcggtcccctttttgaatgctgtcatattgttttttcgagacgaggacggcatgtttctttccgttttgatcttcaatcaacagccaatatcttttttcttttcgttcagagagcgctttttctttgattcctgcggtacggaggatgtttttttgttccgctgtatatccgcctacgtggaagatcatccaatatggaaagtagtaattcaaaaaggctgatccagcaggattttgattgagtgtccgcttgatgcttcctttgtacagggcatcgggaggcagtgtccgctgaatggtgttgaactgactgttcttgtttaagtatcgtcggctcgcagactgtttcatataactgcgcatactctggttgactgaacccgcacgtgtttttagagcgctgttattagccgaggaactcgaagccttcaccccggatgctcctttgctgcctgctgcctctgcttgagcaaaaggcagcaagagggacagcgccatgatcaaaataagaggagcgctttttttcttcattgttcatcactgcttttttgttcaactttgtctttgacgacgccctcaagcggctcctgatcatatttaatgtatgggggacgaaagatgaaggcttcctgatcgcggattttaatataaggctgttcgacattttctacattttccacatattttttgaaagtctccgtcttttcttttccatctttcacgtatgctgctttcagtaatggtgctttgtcggattcgctgtcattcacgtaatcaaaccatacgagatcgtatttttgaatggattggtcatctgcgacctcctgtgaacggtctgaagcggatgatgaacatcctgataagggaacggctaaaagcatcgcagccgcggataaagagatcagtttcgattttttcactgtgatcatcctattcatttcggtttcgcttttatatacgaacgatccgggcaaaggtgtcatctattcaaaatagattggcagaaaacagggcgtaacaattgcattttaaacgtaaacaaactgtaaaataccatttctatgaaaaaaggtataatttgaatgtcagaaaaaaatcccattcacggaggatatttttatatgaagaagatacttttttctgtttttgttttggcaggcagcttgctattggcttttaattttgccggtgaagcgagtgctaaaacgaaaaaagtcagcggctatatcacttggtacaacggagtgggcaaaatcggcgctgacggcaagaggctcggccattgggactgcgccacaaagatgggcttcgatgttccgagaaaaggcacaaaaataagagcctattcaaaagcaaaaccgcacaaagtcattacagtctataaatatgatgtcggcagaatgccgggcgctgttttggatgtaagcccgaaagcttttagagctttgggatttccgacaagcaaaggaaaggtagccggacattatacatataaaaaataggagaaatgaagcaagaaaaatcgttttcttgcttctttcaattggcggggtcgaatatgaaaaaagtttcagttgttttgttggcggcagtcattttagccgcaggcgcatttgcggccgtccgctatttcgtcccggaaaaagcggagccggcaaagagcggcggttcagacctgcttgtatcgataaccgatcagaagctgatgaccgcttactatgaaaatcaaaataagctgtatgaagaaaagatgacggattatccggctatggcattagaccggaaaaaacgaattctttactatacaaacaccgataacagcaatgtgaagcatttgatcaggctggatttacagtcgggcaaaaaaacaaccctatattcaggagatgaatatgtcgacgggctcagtttatcggcggacggttcgaagctgttcatgagatacaaccttgcggaggagaggaattttcaccttgcttcctttgatttaaaacaaaaggcgtttcatgtcatctatccatcgttgaaaaacaaggacgaaactgtcagctactatcagtacaacaaagctgacaatcaattcgttatgctgcattattcattgaaggaagactatcaaaaaacagatgatgcgaacaacaaaggcgtgccgcccgaaccgacgaatatgaacatttccatggcgggtgtgaaagatcggcaaaaggtgagaacgatagcaaaatttatcaatgacgtggcaatttcgccggatggaaaaacgattgtctttacagaatcggctgatgatcagaaggcgatttatgcgatggatgccgaaacgaaaaaatacaaagcgatcatttcagatcagcaggcattttcattggtcgattcagcacagccgcaattctcgaaagacgggaaaaagctttactttctcgctgaagcaaaagatgcgaagctgcttgaagatgaaacggggagcgaagcaagggtgagaacgatctattcgtatgatatggatacgaaaaaagtgagcaaagcctgggaaaaaacaaacgggatcatcaacacctttacggtcattgacgaataaacgggcaccagccggcacaaacagactgcgccggctgtttttttatgagccgtttgcctgagacgctgcagcagagcttgtcataatggcgattgctgccgtctgctgtgcttgaataacagcttcaagcgtttgataaagccctgtatccaaaagcgccgggtcttccgttttttcgctcatgtacaagttgacggccgttttcagattcatgtctttctgccacctgaacagtttatcgctgttcaatgcgcctgccatgatagtgatggcatctatgtctttttcgccgttctcaagcagcgcgagcagtccgatttccgggtaatggacaggctttggtcttttatgcttttttgtcaattcatcgtatatccggagggagcgggcgacaagctgatctgaatcctgctccggcataagcgagaggatgtggctgagaaactgcaaatcgttccctttgcgaaaacccgcctggttaagcttttggtaaaacgcttcgatatagtcaatcagttcacctgtctccatatctgaaccggccaaaagcacggagagcgggtagtcgccggcagatgttaaaaaaacgtgcttgtccttcattcctttgtaaatagacaaagcccgattgattttgctgtcatgatcatgctcatcacggtattttgtcaaaagaataagagcggacaaataagtgaaaatactttttttgaatccgttgccggtcattttttcataaagagtgaaaaaaggtctgatatgcgtttcaggttcttcgaagcgtacgtcaaacatagcggcaaaagtgtagcgatgggctgacctcaacggcgaaaatgtaccggcggcctgtttgacagcctcactcagctttaaaaaccgttctttatcaaaaggccgcttgttgacgacatacatggaagcaatcatcattaatgtccgctgatctgtgactttccattttaaatcgctttttaactcagagtaaattgctttatattgatccaatcgctgctgcagtttagcagatgccatttatctatctccttcctaggtttgcgtgtttttgtatatacgaaacaaagggaaataagtttcagggatttggcatcatatcgggcttctgcttaataatatggaaaaggatacagcgcagcaataaaaacaaacgggaagatccttctcctgaaccgcctgaatcgtcggcgcggatatccgtaaccgccgtaaaactgcctttcatctgtcacgtcttcgggaatgaggacagatgcttcctgacggttcaccccttcaagaatgccgtgaacagaactgccgtccttcattttcagcacgacgtgatagtgcatgtatttgcggcataaatcgtgcaaagacctttgatgatcatggggcatcgagcaagcggcatctttcggaacactcatattcctttccatctccttttagatacatggtattcacccgatggatgaatgttccggtttgaagcggtgaagccgtgattttatgtaaaaaagccgattatcatatatgaatcggctttaaagatcaacggtcagcacttcattctgcggcatttgaagcggtcgtcatcgtcatcagaaaagcactttctttttctgcatttgaaccggtcatcgtcagagctgcgggttttatccgttttatccgctttagctgttttatctgttttattcgttttatctgttttattactatccgccgaacgccgcgctttcattgactgtctttctttttcccgctcagggctgtatggatcgtaattgtcatagtactcttcgtagctgctcattttgaggcaatcaccgcctttgggtcatgatatgataatgtattataaagaggggcgttttgcctgtgcatatataacggtttttcgtgctgtaaataagctgatcaactgacaaaattcaacattgaataaaggatttttcgtttcaaccgctaatattatatgtatcaaccatttttttacggctgcgcctgccggtgcttgcggaaagcattcagacggacggcctgatatgatagaaggagcggaatgccgatgaaacgatccggaagtgaaggagagtacttatgaaaaatagtagaaaaaaagagatcttatcgtgggtgaaaacacttgtcatcgccgcagcgcttgtgatggtttgccgctattttctgtttacgccgtcaaccgttttgggagattcaatgtatccgactttagaggacggcaacatggtcatggttagtaagatcagcgatattcagcgctttgataaaattatttttcacgcgcctgattcggatgaaaactatgtgaaaagggtgatcgggctcccgggagatacgatcgaaatgaaggatgatgtcctttatataaacggaaaagcatacgatgaaccttatttaaagaaaaacaagcaaaagctgacgcttcatgaacatttaaccgataatttcacattggagaaattaacaggtgaacaaaaggtgccggaagatcacttgttcgtgatgggggataaccgtcaaaacagcaaagacagccgctttttcggatttatcacaatggactccgttgtcggcaaagttgagttccgttatttccctttcaatgagatcggcggaatagaatagaaaacaaaaaggcttcccatgatacctaatgggaagtctttttgtttgtcgcaaagtcaccaaaagtggtttaaaccaagccgctatgcttgagcacggcggcaattctactattcacttaaatttaaattagagccagtttttgatatcgcagttgcagaattaggtctctctgaattataaggattgcctttaatttggtataaaagcctgtttaatcgctgattacccaaacaaaaataactaaaaaatcctcgatttaacaatttagtgtatggtactctttaaacatgtaatcaaaaaactatctttttcgctccaaagcaacataccgtatttcttggtttgttttttagttgttctaaatattttttattgttatcgcaattcttacgttgtttgctgcaatgattgaagtactatattacataaattctgataggaggtcattatgtttaatagacaacagatagatcatctgcttgaagaaaaaaaaggagagctgaagaaaaagttcggaagtggttttatcgcagttttctatatttctattcttctttccatatgtacgttttttatagaatacaaatattttctcattgtattattcgcacccactattattgtcatgttaatcaaccctcctttttccgaaaaaaaaggggtgtttcgtttcattgccggcctttatttgcttttattggcactggcaacatacttttggcttcgagcataaacagtccggatataaaaaacaaaagtggcttcagcccgcggagaaaaggcgaatttacgtttaacattgctgccaaaatctcaaaaatccggcgacttgacttgaaagagtcctcatcgccagaaaacagaatgaattggataaaaataggacagattataaaagtccgacctattttgtcaacgatctgaaaggctgcctgcagtgaggatgggaagcctttttagcatttgcgcattttggcgagcggacggtttgaacaattatctggacagtgaaataatgaaataagaaactggcaacaaggaggataagcagatgaaagtgtttgtagttggggcgaacggacaaatcgggcgccgtttgacgaaaagtttgaatgagagcagcgaacatcaggtcagggcaatggtgagaaatgaagagcaggcgcaagctttgaaacaatcgggaacagaaacagcgctcgctaatttagaaggcaccgttgaaagcatcgcagaagcggcggagggctgcgacgcgattgtctttaccgccggctcaggcggcaatacgggcgctgacaaaacgcttttggtcgacttggatggggcggttaaaacgatcgaagccgccgaaaaagcaggcattcgccgctttattatggtcagcacattgcaggcacaccgccgtgaaaattggaatgaagcgttaaagccgtattatgtcgccaaacattatgcggatcggatgcttgaaggcagcgaattaaactacacgattatccgtccgggaggcctgttaaacgaaccgggcacaggccgggtgaaagccgcggaaaatcttgagcgcggaacgattccgcgtgaagatgtggccgataccatcttggcggcgctcaccgaggagcacacattccgtcgttcgttcgatttggtttcgggtgatcaaacgcccgccgaggcgctgaaatctatataaaaggattcggggaacctgtggtcagaaggttccccggcgtttttacagaagcgggatatagatggtcatcttcatctcgttcggcggtacggaacggcacacatcagtcacttcaaagtccggtccttctgttctctcgtaattggtattcatcagccatgatccatagatgtatcttcttgtgttctgcactgattcagtcgatccgtttacatgaaatacggcgtatttgccgccggaaattttcgtatagataagcggctccggcacttccccggctgctgtttcgcgaacggcttccccgataataaatgagaaacctccgtcatcctggaagcggcatgacagcccgtaacacatattcggatccgttttttgaggaatttgcataaagtatccatttctgccgaaatcgttgtagaatttcgggatatcttcgaaatacttttcatcgtttaaatttgtccggtactcatatccgatcatatgtatgtcgtttaaatgagtgatgtgcggctttgggatgttcatatctccagtcatcctttctttatattcgaggaaattaattttagattgaaaatcaagcttgaccttcgctttgcgatacttggccggagtgatgccgaagtactgtgagaaagccctgctgaaagcttcttgtgagccatagccgaaattgattgcaatgtcgagaatggaacggtctgttttctcaagcagaagcgcagcttcagacagacgccggttgcgaatgtattgataaacggaaaaaccggagatcgcctgaaaaagcctttgaaaatgaaatggggagaaacacgatttagccgcaatatccgtgatgtttaaatcgttttgaaggtgttcttcgataaactgaaccgcgttttgaattctttcgtaatcattcatattcatccacagcctttacgatttgatgatcctattgtacaggatcaagcgatggtttttttgatgatttgtgcttttttaaaagcctccaaatgcggaggctttttcttattgatgacgaacatctgtcacttcaagagggcgcatcatatcgtaatcttcgtgctcaaggatgtggcagtgccaaacatatctgccgctgtacggcgcaaaggtggcgataatgcgcgtcactgagcccgggggtactttgacggtgtctttcagccccttttcattcggtgccggaggaactgccggaccggtaaaaacaagttctccgttttcctgataccgctcgatatcaaacggctggtggtcgagaatcataaattgaacaagatgtaaatggatcggatggatcgcccttccggcattgatgatcgaccagatctcagtgctgccgagtgcgggtgtttcggttaccggttcatgccactttgtgttgtttaaaagcagaacaggtcttccatattggtcaacggccgcgcccaatgacagatttctgagggcattgatcttgtgtctccggtaaaatgggcgctttctcaatattctcggcaatgaacttgtatctttttgcttcaaaggttttgagatgcggaattgcatgatgtcggcatcagtatcgggatctgcgtcttgtccgccgcagccgatccggtttttcagtgtcacggtttttccttctgctcgtgaaaaatcaacgatgatatcgcacctttcagccggcgcgatcaccagttcattgactttgaccggatgctgcagaagaccgccgtccgtgccgatttgatgacatgtgatgtcatgatcgaaatacagctcaaagattctcgtattggaggcgttcagtatccgaaaacggtattttcggggttccagttcagcgaaaggccataccttgccgttgactaaaatggtatcaccgcaaaaagccggaacaatcgacgggtccggaagatccggcgaagggttgtcaggctgccgcggataaaacaatgaaccatcttcatgaaatgatttatcctgaatcaaaagcgggatttcatattctcccttcggcaagttcaatgaacgctcttccctgtcgcgaataaaatataaaccgacaagccccgcatatacattcagccttgtgatggccattgcatggtcatgataccaaagagctgtagcatcctgctcattcggatattcatacacctccctttcaaagaaagggccttttgcatggaagtcttttgtgtaccaagcctcaggatatccgtcgctgtcagcaggcgtacagcctccgtgcaaatgaacgaccgtcttcacttcatgttcgtgatggccgtcatcgtgaagcgtatggtcgacggggagaaaatggcgatccggaagcttatttaaccacttgactgcgactttttcgtgtttctgcacttcgaaggtagggccgggataaactccgttatatccaaacagccgagtcggcggcagatcgcggtgaagctgctgctgaaattctttcatggtgacttcataataggtcatttccttgcttttgctttggggttgaagcacttgcggaatggggagccggtcaacgaatttttcaagtttcatgtttcacctgtcctcttttgttctgatgaaaagatcattacattataagacgggttgcatggtctggttcctcatgatgagaataagaaacgcagtatgtgctgagtatgttaaaaaatagaatcgatcattacaagaagatgaacaaaatatttcctgacgattaaaaatcgccttgaggcgtgattcgcggaggaagaaaggcggggatgatggtacattatgtgtaaaccctttcttatggggcgaagcggtctgaaaggagatacccgtgttgcagaaaagaatagagtggattgatgtttcgaaaggcgtgggaattatattggtcgtattgggccatacaccgacgccggattggctgaaaacgttcattttcgcatttcatatgccgctgtttttctttctgtccggcctcgtttaccatgatgggaatatgacttttacatcttttctcttaaaaaaaataaagacgctccttttgccgtacttcatcttctccgttcttgcctatttattctgggttctcgtcgagaggcattttacgttcaccggcagttcggatgtcgacccggttgtaccgtttaaagggattttttattcgatgcctgatgactacatgctgacacacaacccggcgctctggtttttaacatgcttattcatcgttgaaatactgtttttcatcgtgaagagatgggggaaaggcagactgtttatcgtcatagccgtattggtctcagccgctttaggctttttgaattatcaatatctcggcatcaagctgccgtggaatattgaagtggccctgaccgccatcgtcttttattcggccggttttctgttgaaaaataatctgaaagagatgagagaccgaagaatgctgctgctcacgcttcttgtattcatcgcggtcggctgcttgcagaccctgaacgtcagagtggatatgagggccaatgagtacggaaacatggcgctcttttatatgacctcatttctggggacggcaggcgtcattttcagcagctttcaccttgaaaaagcaaggcttctccaattcctcggcaaaaactcgctgatcattctcgtactgcactatccggtcatcaggatgctgaaagccgtcgtctactacttcacacaggtttcccttgatgagacatacggctccctgttgtggagcgcgctttacaccggcatgacattgcttgtaatggtgccttgcatctttttgttgaaccggtatccgatcgtacttgggcggaagaaatgcaattaaaaaaacttgcaaagttttctttgcaagtttttttgaattatttaaggttgaaagtaatctttttgtcattccaaaattcaggagtgtagataactttatatgttttgctctttttagtctcgaaagtgattgttccagataccttgccgtttggtgtcagatttccagaagataggtcgttatcatctgatggtccaaacgtattgtgcgtaatttgtccatcttcattttgaatttgaaaatcgagcgggttataggaaatatctttatcgcttttattttctatgttaagtgttgcaactacatattcattaccgttttttggtttgaaatattcattgcccatcgattttttaacgttagtaactgtgatgtgtgtgccgtcaagatcagctgtttcatttaaaccgaattcagttttttctttggcatcgtcattgcttttttcttcgctagtttttgcggctgtcgtctttgcgctgcttccggacgatttgctctcttgagtagaagagccgcttgaagcgaacatcatgacgaatacgatggagccaataatcgtgacatagaaccaccatttttatagacaaggcctttattcccgccactgaacaatgctttacatccgccgattaaaagcaggataagcggaacgatatatgccaggctgacgccgacagttcctcctattgcagcagcgatataaaaaggttgctatctgcgctggccattgtcggtgcatgtatcgtaatgtccacctcataatctatgtaataatgtctgaaacataataatccaaaaaaaggaaaaagtctattttattatgatattttaatcgtcagagctttaaggactattttcgacttttttaatatcgtttaaattttgagtttgtttaatgtttttcagaagaatcattcatggattctaaagaaaaaatattctgaaagaagaaaccgtcctttccatcctatgacgcttgaataatttgaggttttcgaaaaatccttatatagagcgggttttaacggttttgaccaaactgaaatttgtttccttaaataaaaaaagttctactctgactatatttctgcaagaagtgaatcatgtttctatagactcactcaagttttgctttgtatgattaaaagcgaaaactcggatgggaaaggaagctttttatggaacggtatgatgaattaaaaaaaggtgaaaccggggcatgggtcagcatcatcgcttaccttgtactgtcggctgttaaattggccgtcgggcttgcatttcactccgaagccctcagagccgacggactgaacaatacaaccgatattatcgcctcattagcggtgctgatcggcctcaggatttcgcagaagccgcctgatgaagaccatccgtacggacatttccgcgctgagacgatcgcctcgatgatcgcttcatttatcatgatggtggtcggtcttgaagtgctgtacagctcgggcgaaatgctgtttaatccgaaggaaacgacaccggacatgattgcggcctggacggctgcaggcagcgccgtcgtgatgtttttggttttcctctacaataaaaggctggcaaaaaaggtgaacagccatgccctctatgcagccgccgccgataataaatcagatgcctatgtcagcatcggaacattcgcaggcatctttgcttcgcaatttaaccttgcatgggtcgatacggcagccgcgtttatcattggattaatcatctgcaaaacggcttgggggatttttaaagaggcggcccattccttgacggacggattcgatattaaacatatttcaacctataaagaaacgatccggaaagttcccggcgtcggcaacatcaaagatgtaaaagcgcgttatttgggcagcgccatccacgtggaaattatcgtggaggtaaggtcagatctcaacattgcagaaagccatgacatcgccgatgaaatagagagaagaatgcaggaggagcactcgatcgttcattcccatgttcacatagagccttctaaagaaaaataaaaagcggtcactgaccgcttttttttactttcatcactctgtaaattcgaaatgaaaaaagacaaaattctattttccgccagtcagttgttttctgggagcacatcgtttatggtaaagttaaataaattcgattcgtcagcaatgaggaggaagaggatgtcatacgaagaaatgctgcatcccgttttgggaaaagtagctgataatattgacaaagtaatggtaggaaagaaacatattgccgttttaagcctgactgccattcttgcaaacggacacgttctgctggaagacgtacccggcgtcggaaagacgatgatggttcgcaccctggcaaaatcaacaggcgctgaatttaaaagaatccagtttacgcctgatttactgccttcagatgtaacaggggtttccatatataatccaaaaacgctggaatttgaataccgttcaggtccgattatgggggacatcatcctcgccgatgaaatcaacagaacatcgccgaaaacccagtcggcgcttctggaagcgatggaagaaggaagtgtgacagtagacggtgtgacaatgccgctctcaaagcctttttttgtgatggccacgcaaaaccctgtcgagtatgaggggacatacccgctgccggaagctcagcttgaccgctttttattcaagctgagaatgggatatccgacagtccgcgaagagcttcaagtgctcgatcttcaggaaaaccgcagccccattgaggaaattgagcctgtcatagagaaggaagagcttgccgcatttcaaaaagaagctgaaaaggtgtatgtagacgctgcgattaaagaatacattgttgggatcacccaaaaaacgaggagtcattccgccgtttatctcggggtgagtccgcgcggctcaatcgccttgatgaaggcggctcaggcgtttgcatttttatataaccgcgattatgtcattcctgatgatattcagtatttggcgccttttacccttgcgcacagaatgatcctgcggtcagaggcgaaatttgaaggaaagcggcctgaagctgtccttcaggacatcatgtcaaaaaccgaagttcccgtcggaaggccgatgagcagctgatgagagagcgcatcggtcttgtgatgtacggatggaagctgtttattctgtttcttctgtttgcttcaacgttttgctatgcgatgtttcaagggggatttgtcagctggtttctgttctactcatttctcccctttgcgctttatgctttcctgtttgctttttatccgctgaagaacttgacagcggagcggaggctgagccaagggcagtataaagccggtgatcaattggaggctttcgtcgtgctgaagagaaaatggccttttccgatcatgtttatgatcgtggaagactgcctgcctgattcgctggggaaaaacaggggttcggcagaggccaaacagcttctctttccttggtttaaaaaagaaattaaaatggcgtacacgatcgattcggttccgagaggagaccaccgtttagcaaaaatcagagtccgtacaggtgatccgctcggcctgctggaaagggaatgcgagattcaattggaagcttcctttctcgttttgccttcctatcaggagatcgcttaccgcgccagcggaggctcttatgacgagcatgcaggccgcgtttcagagcttcgccgcaaggacagtacactggcgtcaggtatcagagaatatcagccgggcgaccgttttgcatgggtcgactggaagacgtcagcccgccgcagccagctgatgacgaaggaatttgagcagacgaaaggggatgacctgctcgtctttatggatcagtccccgtctgaggcttttgaagagatcgtcacgtttaccgcttccatcattcgttcggcaatgcggagcgggacgaatgcagggcttgtttccattggtaaggagcggaatgtcttcccggttcggcagggggaagagcagctgagaaagctgttctactacttggcgattgccgactgcaatgcagtccagccgtttcacagtctgatagagggggaattgggacattccgatatgagaaaagccgtcaaatatattgtgacaagccgcatcacgatcgaactggtgcaggctttgaagaaaccgctctccggcgggcggcccgtcatttgtttggtgaagaaaaaaggcggagatctatcaagcgaggaaagcgcggctgtccagcatttaaaagcgcggggaatcgaagtaaacgtcatttacggggaacatttttcccggggtttggctgaagcgaggtgagaaaatgttgtccgggggaaaaagaaacaggttcggtttattgcttttttatgtgctgacttttttgctgctgtgggagtggctccgtcctttgcagtattttaccgatacggggcacaccgtcttttttattttatttatcgctcttgtatttttgcttacattttttaaggtcccttggtttatcagatttccggtcagccttggcttcgttctgtttgcactgcacacgattttttacgaaggatcggtgttttcaccttcatggattgccctgtttttccaggatttaaagcgaaatttctcctatattttctccggcatgtggcgggatatgtcgccgttgtttcggacgctgctcttttacgtccttctttggctgctcgtatacttgctgcactactgggtgatctatcagcgcagaattttattcttttttattatgaccgttgtttatgtcgcggtgatcgatacatttacgccgtttgacgcgtcatatgcgatcgtcaggatcgtgctgatcggctttttgcttctcggcctgctgtatttggaacggatcagggaatcagaagcgctcaaatcctcgaaatcgcggtttgccaaatggtttgcaccgctcttattgatgactgccgccgccgtgtgcatcggcgcggtctcgccaaaagccgatcccgtctggcctgatccggtgccgtttctgcagacggctgcgaccggcgattttgcttcctcaggcagaagcaaagtcggctatggaacgaatgatgaggcattgggcggtccattttcaaaagacgatacatgggtatttacatggcagggaaatgaacgaagctatttcagggtggaaacaaaaagccgctatacaggaaaaggctggattgaagacgaaaaatcaggcgcatccattcagcttgaagaggataaactggattaccagtggtacgacgaaagcgtgaagaccgaaacgcgcaaagcgatcgtcgatatcgatcccgcttaccggtacgatcatgtcctgtatccgatcgggacgaccgaaatcaagctcaataatttctttgtgccgctccgcatgaacttaaatacggagaaaataaaaccggccggcaagacaggcgcggacattcagaatctggaaagctattcggtcacctataaatcacccgtctttgatgtcgatcagctgaggaaagtcagcttggagtcggaggggaaatgggccaggagccatgagaagtacctgcagcttcccacttcccttcccgaccgcgtgaaaacattggcgcacgatttaacgaaagacgaagataatatatatgacaaagcgaaagcgattgagaagtatctcggttcttccgaattttcttatgagacggaagatgtcgctgttcctaaaggagaccaggattacgtcgatcagtttttatttgagacgaaaatcggctactgcgacaatttttccacggctatgatcgtactgctgcggtcggccggaataccggcccgctgggtgaaaggctacacatccggtgaatatgcaggaacgacggcagaccggaaacgcacgatgtacgaggtgacaaacaacaatgcccactcctgggttgaagtgtattttgaaggacaaggctgggttacgtttgaaccgacgaaaggctttttaaatcccgagcagctcgttgaagagtccagcggtcagcaagccggcgcggcttctgataaaaaagaagatgataagaaaaatgatgaaggccagcgtccgcaggatgcaaaagaacaagacaacaaagagaagcccgaatcccaggcaaagcgtgatgccaaagccgattcccatgccggaagcgatgatgcagaccgtactcttttgactggtgcggccgtactcggtctgttgctggcgtttgcagcggtgctttactatacaagggtgaaatggatgccgcacatcatcatcaacaggctgaaaaaacggcgtgatgaagcggttttctttaaagcctacgacgaactgctccgccagctgaagcgccaaggcatgcaaaaagaagaaggccagacgctgcgcgagtttgcgaagacggttgatgaacgctttcaaagcggggacatgacggctttgactcttcaatatgaacgggctttgtatcgaaaggaagacgccgctaagctttggaatgattcggcggagttatgggaaaatttaattaaaaagagatagtcttgaccgctttcagtcgtattgttagaataagtgaatattaaaaacccttatatattcttgctggcaggctcggcggcttatctatcggacaagccgggccttgtcccgtgaatgggggcaggacggccgtgtgtctgccgccattttttctgtgcaaaaagacaatttgataaagaggtgacaccatgacgaagttagtaaatgaaatgattcttgtgttggattttggaagtcagtacaaccagctgattacccgccgcattcgtgagtttggtgtatatagtgaattgcatcctcatacgttgacggcagaggaaatcaaaaaaatgaatccgaaaggaattattttgtccggcggtccgaacagcgtttacgacgaaggatctttccgctgcgacgaaaagattttcgaactggacatccctgttcttggaatttgctacggcatgcagctgatgacgcattaccttggcggaaaagtagaagcggcaagccagcgcgaatacggaaaagcaaacattcatatcgagggtgaaccggatctgtttaaagatcttccaaacgaacaagtcgtctggatgagtcatggtgatctagtagttgaagttccagaaggctttaccgttgatgcgacaagccatcattgcccgaactcagcaatgagcaagaaggataagaaatggtacggcgttcaatttcatccggaagtccgccattcagaatacggaaacgaccttttgaagaacttcgttttcggtgtttgtgaatgcgtcggcgaatggtcaatggaaaactttattgagattgaaatgcagaaaatccgcgaaacagtcggcgacaagcaagtactgtgcgcgttgagcggcggggttgactcctctgtcgttgcggtcttgatccataaagcgatcggcgaccagctgacttgtattttcgtagaccacgggctccttcgaaaaggtgaagcggaaggcgtgatgaaaacgttcagtgaaggcttcaacatgaacgtgatcaaagtggatgcgaaagatcgcttcctgaacaagcttaaaggcgtctcagaccctgaacaaaaacgcaaaatcatcggtaatgagtttatctacgtgtttgacgatgaagcggaaaaactgaaaggaattgacttccttgcacagggaacgctatacactgacattatcgagagcggaacagcgacggctcagacgatcaagtcgcatcacaatgtcggcggccttcctgaagacatgcagtttgaactgatcgaaccgctgaatacgctcttcaaagacgaagtgcgcgcgctcggaaccgagcttggcatccctgacgaaattgtttggcgccagccgttcccaggtccgggcctcggcatccgcgttcttggagaagtgacggaggaaaagcttgaaatcgtccgcgaatcagacgcgatcctccgcgaagaaatcgccaaagctgatcttgaaaaagatatttggcaatacttcaccgttcttcctgatatccgcagcgtcggcgtcatgggagacgcaagaacttatgactatacgatcggcattcgcgccgtgacatcgattgacggcatgacatcagactgggcgagaattccttgggatgtccttgagaaaatctcgacacggatcgtcaatgaagtgaagcacattaaccgcgtggtttacgatattacgagcaagccgcctgcaacaatcgagtgggaataagaaaaatgcctcagccgcatgaagctggggcattttttattggtggagcagtagattggatgatataacgcttatatcttccgttttcatcgccgcagccgctgtgccatgaatcttccgatcacagagtgacaactgaacaaggcattaaagtctacgatacagttcaaacggtgttcgaagcgcggtcttgtcggaggatatgacgcggaaacagaatatcacgctaaaaaaagagcgtgttttatttgaattgaaagaaaaccggggattgagccccttcagaccacgatcagaatttggaaaaacaacgaacgaagcgaacattaaaatcatgaatgttcgtttttttgtattgtgttcaacgttagatattgctacaatagtatagtaatttaaaaaagacttgtcgtataatcatggggatatggcccataagtttctaccaagctaccgtaaatagcttgactacgcttgtatacaatattttatccgtgaaaaatcattttttcagtatgaaatatgccgtagtcaagcgtcccgccagttggggcgttttttgtttaaaagcaaaggtttatgaaacaataaaagcgacagacaaacgagaggagtataccattttgaagcgttactttcagtttgaagaattgggcacaaattatcggagagaaatgatcggcggactcaccacatttttgtccatggcatatattttgatcgtcaacccgcttaccctttctctggcgtcggtggaaaatttcccggatgcattgagaatggatcaaagcgcggtctttacggcaaccgcggttgcagcagccgtcggttgttttatcatggggctgctcgcgaagtatccgatcgctctggcgcccggaatggggcttaacgcattctttgcattctcagtcatcctgaatatgcagattccttggcagacggctctttcaggcgttatggtttccggacttatttttatcgttctttcgctatccggtttaagggaaaaaattatcaattcgattccttatgagctgaaaatggctgtcggtgcggggattggcctgtttatcgctttcgtcggtttgcagggctccaaaatcgtcgtatccaacccggatacgattgtgtcgtttgggaatattcattcaggtcccgttcttttgactgttttcggactgatcatcactgtcattttaatggtattgcgcgtcaacggcggcattttcttcgggatgctgatcacggcgattgtcggcatgattttcggacagattgacgttcctgacaaaatcgtcggtgccgttcctagtcttgcgccaacatttggacaagcctttatccaccttcatgatatctttacggtgcaaatgcttgtcgtcattttaacgtttttattcgtcgacttttttgatacggccggtactttggtgggtgttgcatcacaagccggtttgatgaaggataacaaactgccgcgcgcgggaagagctttgcttgccgattcttccgcaactgtggccggagcgatccttggtacatcgacaacgaccgcttatgttgagtcaagcgccggggtagcggccggagcgagaagcggttttgcggcgattgtaaccggcgttttgttcttgctgtcgctgttcttctcgcccgtactcagcgttatcacttcacaagtgacggcgcctgctttaatcatcgtcggcgtgctgatggtggcgaatctcaacaaaatcgactggaccaaatttgagattgcggtgcccgcattcttcacgatgatcgcgatgccgctgacatatagcatcgccaccggaatcgcgatcggatttattttctacccgatcacgatgatttttaaaggcaaagcaaaagagatccatccgattatgtacggactggctgtcgtatttattctttatttcattttcttgaaataggctgtaggaaaaagcgcttgttcatttgaacgagcgcctttttttatttccaattcatcaaaatcggaaccttccgccttcgtttttcgtcatatataagggctgctgcatctatgataaaaagaggtttgtcttgactgtttcacacagcttatgtaatttataaaagtgcttttcatttatgtaaagcttttgaatagaagaggagttgcttatatgattgaagaacatcacaaacgaaacgaagatgatatagaacaagaacctgcttcgaggatgtcgaggaattcccggaaaaaagcgaagaagagcaaggagacgaatccgtctgcagcaaaagtcaaatcggtgatggagagtgtgattgccgctttgttccgttatttcagctttgtgctcgatattttaaagtccccggtgcgcactgcacttgattatgaccggtcttattttaagtattccgttatttcaatgacgcttttagctgttttcttttcgctcggcaacttttatcagctgcttgcgggccgggggagaattctcgggttcggcgtgtcggtgccgtttatggaagtgtttttggttgtgtttatctactgcatggctttcatgttttggatggcggcagcgagctgggctgtatcgaattttatgctcaggtataaagcttcatttttcgatatcacggcaaagtacggctctttactggttccgtttatcgtccccgccgctctgtggatgattttcgcgattatcaacttcacggccgcgacggtgattctctcgatcgtcatctttatgggattgaccttcggcacttttacattgattcaatcaatttatgaaaaaagcgaaaaaccgcggtttgacctgatgtactgcgtgtttaccgtctttttgcttgaattggtattcgttggggcaacttggaagctggtgggcggatacttgctgtcctcgcttatccctgtataaggagatacagccggttctttaagaagaaccggttttttcttaacattaattctgagttgactcataagaataatatgtattatattgtaaccaatcatacgaacggatgggggagtgatcgatggctaactttcttcgaaaagctgtaaagcaaaaaaaggagtatttaatcaggcagctcgcaaaaccaggacggctggacaatttgaaagacctctcgtcatacacgctgagcgatttggaaaaggaacaccggaagctgcacaaattagatgaagttcgtcagcgggatcataaacaccagctctaaggacgttcatttgaacgtcttttttaatggcgtttaaatgctttgaaaccggcagaaaaagggtaaactgatggaagtgagcaatgtcgaaaaattttgtggtgaagcagggccattacaggattgtgtatggagaatttctctagtagaatatgattgctttgcatctaaaggagggatttcaattgcttcactcagcactattgaacggtgtgatcatggttggaattattctggttatcaatattatatatgtaacgtttttaacccttcgcatgatactgactctaaaaggccagcggtatctcgccgcttttatcgggacaatcgaaatgcttgtttacgtcgtcgggctgggtcttgttttagataatttaaatcaaatccaaaacgtgatcgcttatgcggttggatttggaatcggcatcatcgtcggcacgaagattgaagaaaagctcgctttgggctatattaccgttaacgccattacgaaagagcttgatttggatctgccgaaacagctcagggaaaaaggctacggggtcacccattgggtcgtcggcggacttgagggagacagaacggcgatgcagattttgacgccgagaaaatacgagctgcagctgtacgaaacaattaaatcaatcgattcaaaagcatttatcatttcctacgaaccgaagacgatacacggcggattctgggttaaagccgtaaagaaaaggagaattaaagaataatgacaaagccgaaaaaaaagcgctttgaagtaacggaaggcgaaacgatcgaaaccgtgttgacgaagatgcaggaagaaggctacacgccggtgcgccgaatggaggagccggtcttcaaagaaacaaaggaaaatggaacgattcaggttgttccgtgcggaagaaaaattatattcgaagggaaattactctaaacccgaacattagaacaacaaaatatactatcgttcgataatgtcgttgacattatcacagtccgttgttaagataaacatgacatgaaaacacatcctcatataatcttgggaatatggcccataagtctctacccgatgaccgtaaatcatcggactatgcaggaaagtggacaataaactgacatggagatcgcgagaagcggactaactgacgatacacgcgccatgcccggtttgtgttgcttcctacaaatgcaatacatgccgggctttttatttgcgaagaataacagctaaaggtgggacaaaaggatatgcagcctcttcttggtgttatcatgggaagcacatctgactgggaaacgatgaaacatgcctgcggcatactcgatgaactgggaattccgttcgaaaaaaaggtcgtttccgcacatcggacgcctgatttaatgtttgaatatgccgaaaaggctcgggaaagaggcttgaaagtcatcattgccggagcgggcggagccgctcacctgccgggaatggtcgcagccaaaacgacgctgcccgtcatcggtgtgccggttcagtcaaaagcgctgaacggtctcgattcgctgctttcaatcgttcaaatgccgggcggagtacccgttgcgaccgttgccatcggcaaagcgggagcggtcaacgcaggactgcttgcggcgcagattttgtcagcttttgacaaagagcttgccgaaagattggacgaacgaagggaaagcatcagacaaaccgtgttggaaagcagtgatcagcttgtataaacaaacgatttttccgggagcgacaatcggcattatcggaggcggacagctgggcaaaatgatggccgtcgcggccaaacaaatgggctataaaatcgcggtggttgatcctgttccttcatcaccgtgcggccaggtcgccgaccttgagattacggctagctataatgacggggaagcgatacggaagcttgccgaagcgagcgacgtgatcacttacgaattcgagaacatcgattatgacgcgctgaactggctgaaggagcacgcttaccttccgcaggggagcgagcttttgctccttacgcaaaacagggagaccgagaaaaaagcgattgcatcagcgggctgtaaagtcgcgccgtaccggatcattcacgaccgggcggaattggaagcgtccgtagcggagctcggtcttccggcggtgctgaaaacttgccgcggcgggtatgacggaaaagggcagcacgtcctgaaagaacaagcacaaatcggggaagccgcagctcttttacagcacggcacatgcattttggaaagctgggttcctttcaaaatggaattgtccgtgatcgtgacaagatcggttcacggagagacaaccgtctttccggcggcagaaaacatccataaacaaaatattttattccagagcatcgtcccggcccgggtcgatgaggcgattcaggaacaagcggcagcacttgccctcaggcttgccgaaaagcttcagcttgtcggaacactggccgttgagcttttcctgaaggaagacggcggccttctcgtcaatgaactggcgccgcggccgcataattccggccattacacccttgatctttgcgaaacgagccagtttgaacagcatattcgtgcggtctgcgggctgccgctcggtaaaacggatcttctgaaggaagggatgatggtgaaccttctcggggacgaagtgtacatggctgaagaagatcccgaacttttaaaagaagcgaagctttatatatacggaaagcatgaagtcaaaccaggccgcaaaatggggcacatcacatttttaagaacacccgacaatgaatggatcgggcagatgacagaaaagtggattgaaagagatggaggacgaaaacaatgatcgaacgttattcaagaccggaaatggctgcgatttggacagatgaaaacagattccaagcatggcttgaagttgaaatactggcttgtgaagcttgggctgagctcggcgtcattccgaaagaagatgtgaaggttttaagggaaaaagcgtcatttgacatcaaccgcatcttcgaaatcgagcaggacacgcgccatgatgtcgtcgcatttacccgcgccgtatcggaaacgcttggcgaagagaaaaaatgggtgcactacggactgacatcaacagatgtggtcgataccgctctttcttatctattaaaacaggcgaacgagattttgctcaaggacattgagaggtttattgacatcttgaaagaaaaagcaaaggaacataaatatacggtgatgatggggcgcacacacggcgtgcatgcagaaccgacgacattcggcttaaagctcgccctttggtatgaagagatgaagcgcaacctggaacgcttcaagcaagcgaaagaaggcatcgaagtcggtaaaatctcaggcgccgtcggaacgtacgcgaacatcgatccattcgtcgagcagtacgtatgtgagaagctcggcttaaaagctgcgccgatctcaacgcagacgctgcagcgcgaccgccacgccgattacatggctgcactggcgcttgttgcgacaagcatcgagaaattcgccgttgagatccgcggcctccaaaaaagcgaaacacgcgaggtcgaagaatttttcgcaaaaggccaaaaaggttcatctgccatgccgcataaacgcaacccgatcggttcggaaaacatgacgggaatggcgcgcgtcatccgcggctacatgctgaccgcttatgaaaatgtaccgctttggcatgaacgcgacatttcgcattcatcagcagagcgcatcattctgcctgatgcgacgatcgcgctgaattacatgctgaaccgcttcggcaacattgtgaaaaacttgaccgtgttccctgaaaacatgaagcgcaacatggaccgcacactcggattgatctactcccagcgcgtccttctcgctctcattgataccggcatggcgcgcgaagaagcgtatgacaccgttcagccgaaagcaatggaagcatgggagaaacaagtgccgttccgccagcttgtcgaggctgaggaaaaaattacgtcccgactgtctccggaacaaattaacgactgctttgattacaattaccacttgaaaaatgtcgactacatttttgaacgtttaggcttggcatagaatagaccgcccgcttttacaggcgggggtctaagtgcttaaatatttccaacattcaggttaggaggccttctgtgaatattgtgaaaaacgaacttttatacgaaggaaaagcgaaaaagatttaccggacggatgataacaacactttgtttgtcgaatacaaaaactcagcgactgcttttaatggagaaaaaaaggccgagattgacggaaaaggccgtttaaataacgaaatttccagcctgattttcacaaggcttcacgagaagggaatcaacaaccactttgttgaacgaatttctgaaacggagcagctcattaaaaaagtgacgatcatcccgcttgaagtcgttgtccgcaatgtcgttgccggaagcatgtccaaaaggctcggcattccggaaggcacggagctggggcagccgattatcgagttttactacaaggatgacgcgctcggcgatccgttgatcacagaagaccatatccggattttaaaagcagctgagcctgaacaggtggagaaaatcaaatcgattacgagacaggtaaacgaagagctgcagacgattttcgcggcttgcgatgtcagattgatagatttcaagcttgagttcgggctcgataaagacggcgaggtcctgctggccgatgagatttccccggatacgtgccggctgtgggatcaagaaacgaatgaaaagcttgataaagatgtgttcagaagaaatctgggcggattgacggatgcatacgaagaaatattcaaaagacttggaggcatgtaatatgtacaaagtgaaagtgtatgtcagcttaaaagagagtgttttagatcctcaggggagcgccgttcagcatgctttgcacagcatgtcctacaaagaagttcaggacgtccgcatcggcaaatacatggagctcacaatcgaaaaatcggaccgcgaccttgacgttctcgtcaaagaaatgtgcgaaaaacttttggccaacacggtgattgaagattacagatacgaagtcgaggaggttgtcgcacagtgaaatttgcggtgattgtgctgcctggctcaaactgcgatatcgatatgttccacgcgattaaggatgagcttggcgaagaagctgaatacgtctggcatacagaaacaagtcttgatgaatatgacggcgtcctcattccgggaggattctcatacggtgattatttaagatgcggcgcgatcgcccgcttcgcaaatattatgccggccgtcaaaaaagcggctgaagaagggaagccggtgctcggcgtctgcaacggatttcaaattttgcaggagctcggtcttttgccgggcgcaatgagacgcaacaaagatttgaaatttatctgccgtccggttgaactgatcgtccaaaacaatgaaacgctttttacatcttcctacggcaaaggcgaatccatcacgattccggtcgctcacggcgaaggaaacttctactgtgatgaagaaacgcttgccggattacaagaaaacaatcaaatcgctttcacatacggaacggatatcaacggaagcgtcgccgatattgcaggcgtcgtcaatgaaaaaggcaatgtattaggcatgatgcctcacccagaacgcgcagtcgattctctgctcggaagcgccgacggtcttaaactgtttcaatctatcgtgaaaaattggagggaaactcatgtcgctactgcttgaaccaagtcaagaacaaattaaggaagagaaactttatcagcaaatgggtgtcagcgatgacgagtttgccatgattgaatcgattctcggaaggcttccaaactatacggaaatcgggattttttcagtcatgtggtcagagcactgcagctacaaaaattccaagccgatcctgaaaaagttcccgacaaaaggcgaacgcgtcctgcaaggaccgggggaaggcgcaggaatcgtcgatatcggcgacaatcaggcggttgtcttcaaaatcgaatcgcacaaccatccgtcagcgattgagccttatcagggagctgcaacgggtgtgggcggcatcatccgcgacgtcttttcaatgggcgcgcgtcccatcgctgttttgaactctctccggtttggcgaactcacttcaccgcgtgtgaagtacttgtttgaagaagtagtcgcgggcattgccggatacggaaactgcatcggcattccgaccgttggcggggaagttcagtttgacggctgctatgaaggcaatccgcttgtcaacgcgatgtgtgtcggtttaatcaaccatgaagatattaaaaaagggcaggcgaaaggcgtcggcaataccgtcatgtacgtcggcgcgaaaacggggcgcgacggcatccacggcgcaacgttcgcctcagaggaaatgtctgaccaatcagaagaaaagcgctcggccgttcaagtcggcgatccgttcatggagaagctgcttcttgaagcgtgtctggaagtcatcaaatctgacgctttggtcggtattcaggacatgggtgcggcaggcctgacaagttcaagcgcggaaatggcatccaaagccgggtctgggatcgagatgaaccttgacttgattccgcagcgcgaaacaggcatgacgccgtacgaaatgatgctttcggaatcccaggagcgcatgcttttggttatcgaacgcggccgcgaacaggaaatcatcgatatttttgacaagtacgatcttgaagccgttgctgtcggccatgtgactgatgacaagatgctgcgccttttccataacggagaaatggttgccgagcttccggtcgatgctcttgcagaggaagcgcctgtttaccataagccgtcaaaagtaccggcttattacaaagagttccttgaaacagacgtccctgcaccaaaagtcgaagatgcgaaagaaacgcttctcgagctgctaaagcagccgaccattgcgagcaaagaatgggtttatgaccaatatgactacatggtcaggacgaacacggttgtcgcaccgggctctgatgcagccgtcctcaggattcgcggcacgaaaaaagcgctcgccatgacaacggactgcaatgcccgctacttgtaccttgatccggaaacaggcgggaaaatcgccgtcgcagaagcggcccgcaatatcgtctgctccggagcagaaccgcttgccgttacggataacctcaactttggaaatccggaaaagccggagatcttctggcagatcgaaaaagcggcagacgggatcagcgaggcgtgcaacgtgctcagcacaccggtcatcggcggaaacgtctctctctacaacgaatcaaacggaagcgcgatctacccgacgcctgtcatcggaatggtcggactgatcgaagatacggagcatattacgacacagcactttaaagcagcgggcgatttgatttatgtcatcggcgaaacattccctgagttcgccggaagcgagctgcaaaaactgaccgaaggaaagatttacggcaaagcgcctgcgattgacctggaagtcgaacaatcgcgtcaaaaagctcttctgaaagcgatccgctccggactcgttcaatcggcgcatgacgtctcagaaggcggcatcggcgtggcgctggcggaaagcgttatatcttctcaaaggctcggcgcccatgtgacgcttgcaggcgaacctgcattgttattcagcgaaacacaatcacggtttatcgtctctgtgaaaaaagaccatcaagaagcgttcgaaaagcttgtcaaagacgccgatctaatcggtgaagtaacgtcagacagcgtgctggctgttcaaagccaggaaggacaacaatggattcatgcgcagacagaagagctcgaaagcgcatggaaaggagctatcccatgcttgctgaaatcaaaggcttaaatgaagaatgcggcgtatttgggatttgggggcatgaagaagcaccgcaaattacgtactacggccttcacagccttcagcacagaggccaggagggcgccggcatcgtcgcgacagacggcgaaaaaatgtccgcccacaaaggccaggggctgattaccgaagtttttcaaaacggtgagctcaaaaaggtgaaaggaaagggagcgatcggccacgtccgctatgcaacggcgggcggcggcggcttcgaaaacgtccagccgttccttttccattcgcaaaacaacggcagccttgcgcttgcgcacaatggaaacttagtgaacgccactcagctaaaacagcagcttgaaaaccagggcagcatttttcaaacgtcttcagatacggaagtgctcgcccatttaattaaaagaagcggccacttcgagctgaaagatcaaatcaaaaacgctctttctatgctgaaaggcgcttatgctttcctgatcatgacggaaaaggaaatgatcgtggcgcttgatccgaacggactcagaccgctatctgtcgcaatgcttggcgacgcgtacgtcgtcgcttctgaaacgtgcgcatttgatgtggtcggcgcgacatatctgcgcgatgtagaaccgggcgagatgctgatcatcaatgatgaaggcatgaagtcagagcggttctccatcaacatcaaccgttcgatctgcagcatggagtacatttatttctcaagacctgacagcaatattaacggcattaacgtccacagcgcgagaaagaatctcggcaaaaagctcgccgaggaatcaggcattgaagcagatgtggtgacaggcgttcctgactcaagcatttcagcggcgatcggctatgccgaagcgacgggaattccttacgaactcggattgatcaaaaaccgctatgtcggcagaacgttcattcagccgtcacagtcgctcagggagcagggcgtgagaatgaagctgtcagccgtccgcggggtcgttgaaggaaagcgcgtcgtcatggtggacgattcaatcgtgaggggcacgacgagccgcaggattgtgacgatgctgcgcgaagccggagcgacggaagtgcacgtcagaatcagttccccgcctattgcccatccgtgcttttacggaattgacacatcgacgcacgaagaactgatcgcgtcctctcattcagtggaagaaatccgtcaggaaatcggcgccgatacattgtcattcttgagcattgaaggactcctttccgggatcggaagacagtatgaaggtgaaaactgcggccagtgcatggcctgttttacaggaaaatatccgaccgaaatttatcaggatactgttcttcctcacgtgaaagaaatcgttttgacaaaataaaccggccggcgcgattgaagcgcctggcctgctgaaatgaataaagggcagcagaggcaatgcggctgctcttttgattttgaatatcacgaatggacaagcgcggaataaggagtgattgtgttgtctgaaagctataaaaacgccggggttgatattgaagccggatatgaagccgtaaaacgaatgaaaaaacatgtggaaagaacgaagcgaatcggcgcaatgggcggacttggcgggtttggcggcatgtttgacctgtcggaactgccgtacaaacagccggttctcatttcgggaacggacggtgtcggcacaaaactgaagctcgcttttgcgatggacaagcatgacacgatcggcatcgatgccgtcgcgatgtgtgtcaacgatgtgctcgctcaaggagcggagccgcttttcttcctcgattaccttgcggtcggaaaagccgatcccgtcaaaattgaagagatcgtaaaaggcgtcgcagaaggctgcgtacagtcgggatcagcgcttgtcggcggagaaacggcggaaatgccggggctttatacagaggatgaatacgatatcgccgggttctcggtcggagctgccgaaaaagatggcatcgtcacgggcgaaaatatcagcgaagggcaccttttaatcggactttcttcaagcggccttcacagcaacggcttctctctcgttcggaaagttcttcttgaagatgccggtctgaaccttgatgagacgtatgcaccttttgaacggcctcttggcgaagagcttttagagccgacgaaaatctatgtcaagcctgtccttgaagcggtgaaatcaggcaaaatcgccggcatggcgcacgtgaccggcggcggttttatcgaaaacctgccgcgcatgatgcccgatggcctcggcgttgaaatcgacatcggctcctggcccgttcctcctatcttcccgttcattcaggagaaaggcggcctgaaatccgaggaaatgtttaatgttttcaatatgggaatcggctttgttcttgcggtgaaagaagaggatatgacagacgtgatccaaacgctcgaaaacaacggtgaaaaagcctatctcatcggcagagtgaaagccggaagcggcgttgtgtttggcggtgccggtctttcatgaaaaaattcgcggtatttgcatcaggaagtggaacgaattttgaagcaatcgaaagaagaatgagagaagagaactgggatgccgaaattgtcctcgtcgtctgtgacaagcccgatgcgaaagtgcttgaaagggcggaaaaagccggaatcccgtcgttcgccttccagccgaaatcgttcgacaataaagctgcatttgaacaagtgatcgttgaacagctccgccttcacggagcggaatggattgtgctggcggggtatatgaggctgatcggcgatacgcttctttcggcttaccggaataaaatcatcaacatccatccgtcgctcctgccggcgtttcccggcatcgacgcggtcggacaagcgtacagagcaggcgtgaaagtggcaggcatcacggttcactacgttgacgaaggcatggacaccggtccgattatcgcccagcgcgccgttgagcttgaaaaaagcgaaacactcgcgtctcttgaagaaaagatacacaaattggagcatgaactttatcccgaagtaatcaaagagcttcttgaactaaatggcagaggtgaaaaggaatgacgatcaaacgcgcattaatcagcgtatctgataaaacgaacattgtcccttttgtaaaagaattgacagagcttggcgttgaagtgatttcaacagggggcacaagcaaacttcttcaggaaaacggcgttgacgtcatcggcatttctgaagtgacgggctttcccgaaatcatggacggccgtctgaaaacccttcatccgaatattcacggcgggcttcttgccgtacgcggcaacgaaaagcacatggcgcagctgaatgagcagggtatccagccgatcgaccttgtcgttgtcaatttatatccttttaaagaaacggtttctaaagaagatgtcacattcgaagaagcgattgagaatatcgacatcggcggccccggcatgcttcgcgctgcagcgaaaaaccaccaggacgtggcggtcatcgtcgatccccgcgattacagccctgtgctgaacgacttgaaagaaaacggcagcgtctctcttgagaaaaaacgcgagcttgcggcgaaggtgttccgccacacggcagcatatgacgcgttgatcgctgactatttaacaaatgtaaccggtgaaaaagagcctgaacagttcaccgtcacttttgagaaaaaacaatcgctccgctacggcgaaaatccgcatcaggaagcagtcttttatcaaagcgcgctccctgtcaaagggtcgatcgcttcagctgaacagctgcacggaaaagagctttcctacaacaacatcaaagacgcggatgcggcacttcaaattgtccgcgagttcaccgagccggctgcggttgccgtcaagcatatgaacccttgcggcgtcgggacgggcaacacgatcgaagaggcgtttaacaaagcatacgccgctgacgaaacatcgattttcggcggcatcatcgccctgaaccgcgaagtggacaaagcgactgctgaaacgcttcacaaaatctttttggaaatcattatcgcgccggcattcagccaagaagcgcttgatattttaacatccaagaaaaaccttcgcctcttgaccctcgatgtcaatcagcctgtgaaaaacgaaaaacagctgacatctgttcaaggcgggctcttgattcaggatctggatatgcacggctttgacgacgctgacattacgattccgacgaaaagggagccgaccgaacaggaatgggctgacctgaagcttgcttggaaagtcgtgaagcacgtcaaatcgaatgcgattgtcctggcaaaggacgatatgacgatcggcgtcggcgccgggcaaatgaaccgcgtcggctcggcgaaaatcgcaattgagcaagccggggagaaagcaaaaggaagcgcgctcggatcagatgccttctttccgatgcctgatacggtcgaagaagcggctaaagccggtgtgacggcaatcattcagccgggcggctcggttcgtgatgaagattcaattaaaaaagcggatgaatacgggatcgcgatggtgttcaccggaatccgccatttcaaacattaagggagtgaccagcgtgaacgtattgattatcggcagaggcggcagggagcacacgctcgcctggaaagcggcgcaaagccctcttgtcggcactgtatatgcggcgcccggcaatgacggaatggccgggaccgccgtactcgttgatcttgacgaaggcaatcacgaagggcttctcgctttcgcaaaggaaaacaatatcggactgacgatcgtcggtcctgaggtccctttaatcgaagggcttgttgatgcatttgaagaagcgggccttccggtgtttggaccgtcgaaaaatgcagctgtgattgaaggaagcaagcagtttgccaaggatcttatgaaaaaataccagattccgacagcagaatacgaaacgtttacatcttttgaaaacgcaaaggcgtatgttgaggaaaaaggcgctccaatcgttattaaagccgacgggcttgccgccggaaaaggcgtcacagtcgcgatgacagccgaagaagcggttcagtgtctgcatgactttttagaagatgaaaagttcggcgaagcaagcgcatctgtcgtcatcgaggaatttttgagcggtgaagaattttcgctgatggcttttgtcaaaggtgagaaagtgtatccgatggtgattgcacaggatcacaagcgggcatttgacggagacaagggcccgaatacagggggaatgggcgcgtattctccggtgccgcagatttcggatgcggtcgtcgaagacgccgttaaaacgattttggagccggcggccgaagcgatggttaaagaaggccgttcgtttacgggagtcttgtatgccgggttaatgctgaccgaaaaaggaacaaaagtgatcgaattcaacgcgagattcggggatcccgaaacccaggtcgtcctgccgcgtcttgaatcagaccttgtccaggtcttggttgatctcctcgcagacagagaagtggagctgaagtggaaggatacggcggcagtcaccgttgttcttgcatctgacggctatccggaaagctatgaaaaaggcgcgccgatcggcacgcttgagcctgacatggagcagaccgtcgtctttcacgcaggcacgaaaaaaagcggcgatcagtttgtgacgaacggcggccgcgtcgccaatgtcaccgcgtttgcagagacgtttgatgcggcaagggaagcagcctatcaagcggtggatcgagtaagaaaaccggggctgttttaccggatggacatcggctcgcgtgcgctcaaggcagcacagaaataataggtgaagagacagagcgggagcacccgttttgtctctttttttgagctcaatttttttggatgatcttgatcatcgattcagccatcaattcgggcggataaggcatgccgttttcaagccaccatgcggctgtgcccgcgaaggcggaaatcacaaaccgccgctgaatgtcgagaggcactgagcggtcagtatcagcagctgccgtttttttgattcccgtcaaaaagctgtcattccaaaaatcattgagcagctccttaatgttcagctcatatcttctgttgatgataatcgcaaaatcgccgctgttctgttgcaaatgatgataaaagcgcagcacataccagtatgcttctggctttttcccgctgctatctatatcaagcggcgaaaaaatatccctcaaacatatccctcatatgttgatgaagcaaatcgtatttatcttgataatgctgataaaatgtcgttcgattcaagtttgcccgttgcgtaatatcctgcacagagatttttccccattctttttcagcaagcagttcaaacaaggctttttttaagtttgttttcgattttgtgatccgcttgtccccgcggtagctgtcagccaattcagccgcctcctcaatcactttttcgacacttctttgccatttgttggttgaatggccagatggaatctattaatttaaaactaacatattgaacttcatgaatcagctgacaagcaaccgaaggagtgaaagcgaatgagtcaaacaaaacagcagaaccccattcagaaagcgctgattaacggaaagaacagacaagacccgtatgatccgtttccgtggtataaaaaaatgcgcaccgaatcaccgattcactatgatgaagacagcaaagtgtggagtgtgttccgctatgacgatgtcaaaagagtgatcagcgacaaagactttttttcaaatcaattccctcagcttggaactggcaatacgtttgcgaaaacgatgatcagcatggatccgccgaaacacacgagaatcagatcgatcgtcaacaaggcttttacaccgcgcgtcatgaaggagtgggagccgcgcattcgcgaactgacgaatgaattgctcgctgatgtccgcggcagggaagagatcgaccttgtacaggatttttcatatccgttgcccgtaatcgtcatttcggaattgctcggcgttccttcggtgtataagcatcatttcaaagaatggtccgacctgttggtcagcctgccgaagagcgatcggccggaagatgtgaacgagtggaaaaacatcagggaccaaggcgaagaagagctgaccgcattctttgaaaagatgattgaagagaaaagacaaaacctcggcaatgacctgatttcgcttttgatcaaagccgaacaagaaggggacaagctgtcccctgatgaattggttccattttgcaatctgctcttgatggcggggaatgaaacgacgacgaatttagtttcaaatgcggtctacagcaatctcgaaacaccgggcgtgtatgacgagctcgccaggcatcctgaactgattccgcaggcagtcgaggaagccgtccgtttccgggcgccagcgccgatgattgtgcgcttcgttaaacaggataccgagatcagaggagtaagcttgaaaaaaggagaaggtgtgatcgctttccttgcttctgccaaccgtgatgaaacgaaatttgagagggcgcacgaatttgatattcaccgccatccgaacccgcatatcggatttgggcacggcatccacttttgtttgggcgccccgctcgcaaggctggaagcggcgatcgccattgaggcgctcttaaagcagtatgcctcgatggaaaagcttgcggtcgtgccgatggccgacagcagcatgtacggcttgaaacatttccatctgcgggtgaagtcagcaggggaaacggcgcctaactaattagaaaagcaccgaaaaggtgctttcagcgtgtcgacaaaccctcgcattcgttgtcaggcctgctaagtcggtgctcacgaatagaggaaggatcggcggctaaccgcccaggcgtcctgcctgaacgccgccgtcatcacctcctgtgaaagtccgctccgatgctcggccttcctagactgcaaggttttcaatcacgctgaaaaggtgacgaaatcctaaaactttaaaccgttttaggatttcgtcaacaatctgccaccttctttcccaagaaggtgtttttttacggacagggcatttctttcattgcataagccggtcagcaggaatttgactggataagcctcgtgctttaaaatgaaagtaataaaaatgaatactccaaaggggagtagctgtcacagtaaagtcgtcattacgggatgtcctagatcctcggctttactggcaatctaattgttagcgagacctttgccaaatctgatttggtgaaggtctttttgtttatccacttcaccaaatcggtggagttttttcatttttatcaaaagggaaaggagactgaccgtgtctaagctcgggaaatggctgaagcgtgaattggtgaagaaaggtctgcctttggcgaaagaaaaattaattccgattttgaaagaaaaaatcaaaaagaaacgataaggaggcaaacaatgaaaagaattcttatagttcttgccggaatgggccttttaggtgcgggcggatgcggaatgcttgatcaggtgaatgacggattgaactatacaaatgaagcggccggctatatccaaaaagtgaagacatttgcggaggaggcgccttccttggctgaacaggctgtaaacgacacgggtgcaaaagaaaagctggaaactcagcttgagtctatccagcaggctgcagccgattttaatgaattaacccctcctgatgccgcagccgaggttcataacaccatcgagaagcataatgaaacactgcaaaaaagcgctgaggatgttttgaaaagtgttgaggaaggaaaattaacagtcgagaagctggagcagtcagaattggtgcaaagcgctcagcagatcagcgatgtgatgggccagattgaaaaattgaccgaatagaaaaaagcatcccggtttgggatgtttcggcttgtcgacaaagtcataaaaagtggcttcatcgacaagcttttttaaaaaaatgtgagtggaatctagattatgttgcccaagcactcaaaagatcagcgtaaacagcttgaagtcgttgccttaagtgaacttgtccctgaagatcaactggtcaggaagatggaagaagccatggatttttcatttatttatgaaaaagttgcccctctttattcttcaaaagcacgtccaagcattgatcccgttgtattgatcaaaatggttctgattcaatacgtgtttgggcatcgctccatgcgcgaaaccatcgaacgggtttttgcggatttaaaacacaagcgtggcctgcgctggacaaccctgcggggaaagaaaaaattgtccatgcaggcgatgcttgttttcgctgccatgaatctaaaaaactggcgaattggacgtggaaaggccctaatcgccagccttttcatcgaaaaaacaaaataaactggacaaaaataggtcggatcttagaaatccgacctattttgtcaacggtctgaaagcacctataaaaggtgctttttatgattgttcgccagtctctccctgttgcttcatatacgtttggcaaacatatgtcatgggacaaaatcgtaaaatgccggaagcggccttcatcgcccccataaacatgcagaaaagcgtcattctgcaccacggttttctcgtaaactttgccgctgccgccgacaggatcgtcagtccgcaggcaatgcgaaaaacggcgtcaaacagtccgatgttttgcttcatactttattcctcctatttaaataattaaataaagtgtttttttaaaaaattgtaacggattggtaatgcgtgacgatagtaaatgtgttaacataggatcattacatgtaaaggagagtatgtgaatgtccgaacgcaccttaatttggaaaaacaagcacatcagatcgcaagttgatgttgtaagttcaaggctgcagccaacgctccttttacgaaatgcatctgtactgaacccgtatgtaaagcaatggattccagcaaacgtatggattcatcatgacagaatcgtttatgtcggccgtgacttgccgaagacggctgttaaaactacaatagattgtgaaggaaaatacattgtacccgggtatattgagccgcatgtacatccttttcaaatttataatccccaaactttggccgaatatgtgtcacagtttggaacgaccacattcgtaaatgacaacttgtttctgcttttacattgcggaaaaaagaaagcgttttctatactggaggaactgaaaaaacagcctgtccactactattggtggtcaaggtatgacttgcagaccgaagtgttgaatgaagatcaaatcttatcgatcgattaccgaaaacattggggagaacacccggatgtcatccagggaggagaaatgacaggctggccgcgccttttggacggcgatgatctgatccttcattgcatgcagtgcacgaaaagaaggagaaagcggatcgagggccattttccgggggcatcggaaaaaacgctgacgaagatgaagcttttcggcgctgacgccgatcatgaagccatgactggaaaggaagtgctgaagcggcttgaacttggttaccacgtcggcttgaggcagtcttccatccgccctgatttgcgaaaaattttgcgcgagctgcacgaagaaggctttcaccattatgaccatatgttttatacaacggacggcgcaacgccgaactattataaagaaggcatgacaaacaagctgattgaaatcgccatcgaagagggcgtgccgctgatcgacgcctataatatggcttcgtttaatatcgcgaagtattaccatatggaggacatccttggggtggttgcaccgggcagatacgcgacgctcaacattttgaatagccctgatgaaccgaatccggagacggttttggcaaaaggtcggctgatcaaatcaggcggcataaatatgaatgcgttttcagttccggattggcaaaaagggggtcttgtccctctgaacctttcatatgatctaacgatggatgatttgcagttttccatgccgctcggcttgaaaatgaggaattccgtcattatggagccttatacgattgagattgacaactctgtgaaccagctttcttttgatcatgatgaaagctatctctcgctgttcgacaaatacggaaagtggcgtgtcaatacgatgctgaaaggctttgcaacccgcatccaaggtttcgtcagctcctattcgacaacgggagacattatcgcgatcggcaaaaacaaggaagacatgcttttggccttcaaacggatgaaagaaatcggaggaggtatcgtattagcggaaaacggaaaaattctgcacgaaattcctcttcatttaagcggcggcgcatcaattgagacgtatgaaaaggtgcttgaaagggaaaaagcgttaaaagagcttctgtttgaaagaggctatacgttcgacgacccgatctacaccctgctctttttgcaaagcacccatctgccttatatcagggtgacgccgaaagggatctttgatgtgatgaaaaaaactgtactctttccatcgataatgcgttaaaatataaaagagcgggagctaatctatggtgaatcgatatgtaagagtactgctttgttttgcttcgcttttactgcttgcatcgtgccagtcgcaggaacagcaggaaaaggaaaagaacattcatccgctgacagggttgaaggcggacggagatattcggcagcggcccattgccgttgtggtgaacaatcattcaaaagcaaggccgcagtcgggattaagcaaggctgacattgtcattgaagctctcagtgaaggaccgatcacacgattgttggcgatctatcaaagcgatatgcctgaagcggttggcccagtccgcagcgcccgggagtatttcattgatttggctctcggttttgacagcatccttgtgcatcacggctggagtccgggggcaaaagaccgcctgttgaacggcgacgccgatcatatcaatggaatggatcacgacgggaccctgttttggagagccgattttcgggaagcgccgcataattcgtacacatcatacaaaaacgtaaagcaagcagcagatgacaaaggatatgccatcgaaacccgcacagaaccgctcacttttaaagcaagccctgataaaccttcggatgcgctttattctatacggttagactatggaacaaaatccgttacaaaccgtgtcgaatatggttatgataaaaaggttgaaggctatgtgagaaagtcagacggcgttttgacaacagaccttgaaacagaagaaccggttgttcttcaaaacattctaatagcggaagccgaacatcatatgaaagatgcgtacgggagaagggatattgaccttcgttcaggcggaaaaggactccttctgcaaaacggggaagtccatcggatcagctggaagaacgaaaacggccggatcataccgacggctgacggcaaaaccgttccgttcgtgccgggaaaaacgtggatcaatatcgttcccgatctcagcaaggtttctattagcaaaggagaaggtgtgtaaagatgcagatcgataaattgcgcgggagagagctggaccagctttttcaatccatactatcactaaaagatctcgaagaatgctatcgttttttcgatgatttatgcacaataaatgaaattcaatcattggctcagcggctcgaagtagccagaatgctgcgcgacggcaacacgtatcataaaattgagacggaaaccggagcgagcaccgcgaccatttccagggtaaagcgctgcctgaactacggaaatgacgcttatatcatggcgctggaccgcgtcaaagcaaatcaatctgaatcatcttcatgatgtcatgaaaccgcctggctcagggcactgagcaccggcggtttttttgtgcttctgcccgtttatcgtttatttgttatccgtttttcgaaaggggctgaatttgttataatatttaaatggtaagaacgcgaatggaggagctttttcatgtacgatattaccgagtggaagcacgtctttaaactcgatccgaataaagatattacggatgatcagcttgaacagctgtgcgaatccggaacagacgcggttttgatcggcggaagcgaccatgtcacagaagatgacgtccttcggctgatgtcaaaggtgcgccgctttttagtgccgtgcgttcttgaagtatcgacgatcgatgcgatcgtcccggggtttgacctctattttattccgactgtgctcaacagcagggatacagactggattgccggcttacataaaaaggcgatgaaagaatacggcgagctgatgtcgccggaagagattgttgttgaagggtactgtattttgaatcaggactgcaaggctgccgctttgacgaacgcagataccgagcttgacattgaggatattaaagcgtacgcccgcgtagctgaacatcttttccgccttccggtcttttatcttgaatacagcggcatgctgggtgattcagagaccgttaaggaaacgaaagccgtgcttcaggaaacgacgctgttttacggcggcggcatcaaagatgcggagacggcggttaaaatggctgaacacgccgatgtgatcgtagtcggaaacgcgatttatgagaacttcgaagaagcgctgaaaacggtacaggccgtaaaaggatgagcacaacgaaccggattggtttataatagaacatatgtttgaataggcggtgaacggaattgaattacattagcgaccaattattaagcggattgaacaagatgcagcaggaagcggtcaaaacgacggacggtccgcttttgatcatggcaggagcaggaagcggaaagacgcgggtattgacgcaccgcattgcgtatttaatggcggagaagcgcgttgccccgtggaacatactggcgattacatttacgaacaaagcggccagagaaatgaaagaacgtgtggaaagcattctcggaccgggagcggatgacatctggatttcgacgttccacagcatgtgcgtcagaattttgcggagagacatcgacagaatcggcatcaaccggaatttctcgattcttgatacgtctgaccagctttccgtcattaaaggaatcctgaaagaaagaaacatcgatccgaaaaaattcgatccgagaagcatactaggatcgatcagcagtgcgaaaaacgagttgatcgccccggaagaatacgagaaaacagccggcggtttttttgaacaagtcgtcagcgatgtctacaaagattatcagaagaaactgcggaaaaaccagtcgctcgattttgacgatttgattatgacgacgattgtcctgtttgaccgggtgccggaagtgcttgaatactaccagcggaaattcaaatacattcatgtcgatgagtatcaggatacgaacagggcgcagtatttgctcgtcaaaaaaatggcgcagcgcttccaaaacatctgcgttgtcggggactccgaccagtcgatctacagatggcgcggagcggatatcgccaacatcctgtcgtttgaaaaagactatccgaatgcgagcgtcattctgctcgaacaaaactacagatcgacaaagcggatattgaacgcggccaatgaagtgattcagaacaactcaaacagaaagccgaaaaacctctggaccgaaaatgacgaaggggcgaaaatctcctacttcagaggcgacaacgaatttggcgaaggccaatttgtcgcgggcaaaatcagggagctcgtcggctctggaaaacgatccttctcagatatcgcgattttgtaccggacgaacgcccagtcgcgggtcattgaggaaacgctgatgaaggcgaacatcaactacaacatcgtcggcggcacgaagttctatgacagaaaagaaatcaaggacatcctcgcgtatttgcgcctcgtcgcaaaccctgacgacgatatcagctttgcgcggatcgtgaacgtcccgaagcgcggcgtcggtgcgacttcagtcgataaaatcgcggcctatgccgacatgaacggtatgtctttatttgaagcgctcggccaggttgactttatcggcctcagtgctagagcggccaacgcgcttgatgagttcagacagacgatcgaaaacctgacgaatatgcaggaatacttatccgtcacagagcttacggaagaaatccttgaaaaaaccgaataccgcgaaatgctgaaagcggaaaaatccttggaggcgcagagccgccttgagaatatcgacgaatttctctccgtaacgaaaaactttgagcagcaaagcgaagacaaatcgctcgtcgcttttttgaccgatttggcgctcatcgccgatatcgatcagcttgatcagaaggaagaagagaccggaaatcaagacgcggtcatcttaatgacgcttcatgctgcaaaaggactcgaattcccggtcgtgttcctgatggggcttgaagaaggagtgttcccgcacagccgctccctgatggaggaagcggagatggaagaagagcggagactcgcgtacgtcggcatcacgagggctgaggaagaactttatttaacgaacgcgcggatgcggacgttgttcggaagaacgaatatgaacccggaatcaaggttcattgcggaaataccggaggaattattggacaatctaaacgagaagaaaaaagatctgaaaacgccgtttggaagaaagcccgagcggagaggccccgttacccgtccggctgcatcgtacagcaaaaccggcggcgacggcgtcaattgggcagtcggcgacaaagcctcccataaaaaatggggcgtcggaaccgttgtcagcgtcaagggatccggcgaatcgacagagcttgacatcgcctttccgagcccgaccggagtgaagcgtcttctcgcggcctttgcgccaattgaaaagcaataatggcaaaagacctgaaatgaaaggacgaaaccaatggaaaaagaagcagctaaacgccgtgtggaacaactgcatgcattgattaacaaatacaactacgaatatcacacccttgacgatccaagcgtgcctgattccgaatatgacaagctgatgaaagagctgattgctcttgaagaagagcatcccgacctgaaaacgccggactctccttctcagcgcgtcggcggagccgttttggacgcctttcaaaaagtgcagcacaaaacgccgatgctgagcctcggcaacgcgtttaatgaagaagatctgcgcgactttgaccgccgcgtccgccaggcggtcggagacgttgaatacaacgtcgagtttaaaatagacggtcttgctgtttcactgcgctatgaaaacggcgtatttgtcagaggtgcgacgagaggcgacggtacgacgggcgaggatattacggaaaatttgaaaaccatcagaaacattcccctcagaatgaaacgcgatctttctattgaagtgcgcggcgaagcttttatgccgaagcgctcctttgaactgctgaacaaagcgcggatcgaacgtgatgaagagccgttcgccaacccgcggaacgccgctgccggttcattaaggcagctcgatccgaaaattgccgcgaaacgaaatctcgatatcttcgtctacagtatagcggagcttgatgaaatgggcgttgaaacgcaaagccagggactcgatttcctcgacgaactcggcttcaaaaccaatcatgaaagaaaaaaatgcagcacgatcgaagaagtcattgagattgtcgaagagctcaagacaaaacgcgccgacctcccgtatgaaatcgacgggatcgtcattaaagtcgattcccttgaccagcaggaagagctcggctttacggcgaaaagcccgcgctgggcgatcgcctacaagtttcctgccgaagaggttgttacgacgcttttggacattgaattaagcgtcggccggacgggcgcagtgaccccgactgcgattctcgaacctgtaaaagtggcgggaacgaccgtccaaagagcttctctccacaacgaagatttaattaaagagaaggatatcagactgctggacaaagtcgtcgtcaaaaaggcgggagacatcattccggaggtcgtcaacgtcctcgtcgaacagcggacgggcaaagaaaaagaattcaacatgccgaaggaatgcccggaatgcggaagcgagcttgtcagaatcgaaggagaagtcgcgcttcgctgcattaatccggaatgtccggctcagatcagggaaggcctgatccattttgtttcccggaatgcgatgaatatagatggtctcggcgagcgcgtcatcacccagctgttccgcgaagacctcgtccataatgtcgccgatctgtataagctgacgcgcgagcagctgatcaatctcgagcggatgggggaaaagtcgaccgacaacttattgaattcgattgaaaaatcgaagaagaactcattggaacggcttctcttcggactcggcatccgcttcatcggcgccaaagcggccaagacgctggcgatgcattttgaaacgctcgataagcttaaaaaagcgacaaaagaagaattgatcgaagtcgatgaaatcggcgacaagatggcggacgccctcgtcacctattttgaaaaagaagagattctgaagctgttggacgagcttgaagaactcggggtcaacaccgtgtataaaggcccgaaaaaagcggccgctgaagcgagcgattcgtattttgcggggaaaacgatcgtcctgaccgggaagctcagcgagatgtcgcggaatgacgcgaaagcggaaatcgaagcgctcggcggaaaaatcacaggcagtgtaagcaaaaaaaccgatctcgtcattgccggcgaagcggcaggcagcaaactggcgaaagctgaagacctaaacatcgaagtatgggatgaggcaagactgatcagtgagctaaagaaataagaggagtgttttctattgaaaaagatattatgtttggcggctgctgcgggtatgctcatgctctcagcctgtgcgccgaattttgggggagaagaagagcaggagatggtgcagaaaacggataagtcgaaagaaaaagccatcattccgaaatacaacatctccgattcttattataaaatggttcttcctttcaaggcggggaaagcccgcggcttgacgaccgaacgcctgaatacgcggctggatatcgatgaatttgagacaggcatgatgcgccttgcgcaagattcattttctactgacgattacctttttcaagaaggacaatacctggatgaggatacggtatcgagctggctcgcccgcaaaaaaacgggggacgacttgaaaaaagcggagaaagacgataaaaacttcaaaaacctcggactgaacccggccctttccggaagcggatcaacagagaagcaaaacgaagaaagcccgatatacctcgcccatatgcttgagcacgactacctcgtccgcaaagacaaggatacgattgagctcggaggcgtcgtgatcggccttgcgctgaactctgtccactactaccgcgaaaatgtcggcgacccgcaaaaagaagtgaccatcagcgacaaaaagctgaggcaggaaggcgaaaaaatcgctgaagaagtggcgaaacggatcagaaacatggatgatctaaaaaatattccgctgacgatcatgctttacaagcaggcgcctaagtcatcgatcgtccctggaaactttatcgccaaaaccgatgtgaaagcagggacaagcgagatcggcggctgggataaaatcaatgaagagtacacgttcttcccttcaacagaaggttcggagaagcatccggatgacgcggagctcttcaaacgctttaaaaacaaagtcgatacgtattttccaaactacacaggggttgtcggcacggctctctataaagacgaccaaatgcaggacatgaaaatcaacatcccgatgcagttttacggcaaaagcgaagtcatcgcctttacccagttcttgaccggtgaagtgatggactactacggcaaaagcggactgaacgttgagatcaacattaattcgtcagccgggcaggaagccgtcattctgaaaaagccgggagacaaagaaccgaccgtccatatttatgattcataaaaaagaagcagccctttggctgcttcttttattacgcagaaaagggatatggagacctatcattcatttatgaagcaccaacaaatttttcttaacgtattctgaataaaatactattgcaaaattaggacacaactcttataattgattatacagaatatagtatattgttttaaggaagattaattatgtgggaaaaattttactctaaaaatggtttggcagctaaaaatattgctaaagaattgatgaatatcaaagcaggtgaaaaaattccccgtatctcagactactgtcataagttatccatcggcagggggactgtgcaaagtgcgctgaatttattagttgatatgaaagcgattcatttggaggctagagggcatttaggaacgtttttggtaagtaaggataacaatttattacttgagattgcaggtattgcaccattaatcggctcaatgccacttccgtattcaagaaaatatgagggtctggcaacagggattgtggaagggtttgaatcaaccggaaaaacagttaacttgatctacatgcgtggcggagtgaatcgaatcgaagcagtccgaacaaaaagaagtgattttgcaattgtttctaagatgacggcagatcatatcatagcagaatatccaaatttgaaaattttcaaaaaattcggggaaagtagttatgtatcttcccataaaatcttcttagctcatccagatgaggaaataggcaaggatggcgtaagagtaggtgttgatttggaatctctagatcagaaacaattaacattggctgaatttgaaaacaaaaatgctgaatttgtcaatgtgaattatatgcagctctttgatatgcttctttcaaaacaaattgatgcagcagtttggaatgctgatgacaaaagaatgattcaaacgtttaaagcaatcgattttttttcaccgaaagcaaagaaaatttccaaggatacaacagaagccgttattgttattgaaggagacagagaaaaagaaatagcagaaaagtggaatttggttaatgagaaacagatattagacacccaaaaaagcgtagaaaagggagagaaaataccgcgctactaaaatgccggcccatccgacttgtcattcaataaatgaggcgatgggttagcatttaaaatctaatttaaaatactaaatacagtatattggaggaattggcgtgaatcaaatacagctggaagaaaagttgtctattttactaacgagtcgagtgattacaaaaaatgctttcaacacaacattgaacacatttgttttcttatcagaaaagctgaaaaaggaggtgatcaaagactctgaaatgttttggacgcacatggcgatggctttaactagaattaaggagggagaaagcgaagaagttcctgcaaatgccatcatcaatgaaatgtatgaaacaccatataaaagtgcaatagaagaagtgatagactttatacattcactggcaggtctagaacttccagaaggtgagctcgtttatttttatcttcatcttcataaagtcatagaatctaataaataggaggattttattatggtgagaattgtaataggcggacagttgaaaaaacaagcgattgaaaaacttgttaaagaaattgggggaaataatgtagaagtattggtcaaaggtgatttggacgctgttatggctgtgaaaaacaataaggcagattattatattggcgcctgtgaaaccggatctggcggtgctcttgcaatggcaattgcattattaggtaaagataaatgcgtcaccttggcttctccaagtaccataaaaaacaaggaagagatcgagaaggaagtagaaagcggcaaaattgcttttggtttcaccgcttcaacatcacaaaatatattaaacattttaattccttatttattaaaataagcgaacttttccaatatatattttgttatacaggcttaaatttttttcagttaaggaaagcgctttcttggatgctcgaaataaaagaagcgtggatgacatgatgtacagaaggtgagaaaaatcatagaggtgaataatgtaatggacctttctttgattcaatgtcttgtcatagcggctgttggtgcattaggttctatactagtcaatcgcggggtagctgtatttaatgatggtttgcgtccgattatgcccgaatacctagaggggagaatgacaagaggggagcttgctgcaacaagctttgcattaagttttggattaatcatagggtttggtattccgctttccataggagcaacaatcattattggacacagtattttattggcttgtgacatcattggcatttggactccggaaaacaaaataggcatggcaactgcaggagttattggtgccgtttatagtattgggatcgttttaggattgcaatttgtagtagatttatttggcaagtttcccgtgaattttatagactctttaagtcttattggccagcctattattatcgcatttacagtatttccagctgtagcggtcggatatcagcacggtttaaaaaaagccgccgtcactgcaattgtaactttagcttcttttctcttattcgaaaagtttggaacatttcaagcggcgggatatgaaatttcgctcagtcctgaagggatggctttattagcaggaatgttaatgatgatttattatgcagcgagaattagaggaggagatgaatctactaatgcaaatttagtgaatatatttaatgagcgtgtaaatcgaattaagaaaaaccgctggttattagctcttatgggagggcttgtttctttaacatcatctatgctgattttagcagtggatgcaatgcctcaagcattgattaataaagagctttacacagaggcggcaatcgctacatttgcacgtggaattggtttcatccctttagttttttcaactgcaatcgtaacgggggtttatggtttagctggtaccacactggtatttgcagtcggtcttattttcagggatataccgattttagcatttctgttgggctttttagtcatgtatttagaggtcatatcattatccgcagtatcaaaaagcatggacaaactgcctggtgtaagggagatgggagagcatatccgcacttcgctgtcagatgttctaggaatggctatattaattggcagtgcgatggcaggggaaaaaattgctcctggcattggcttcttctgggttattggattttatttaataaaccgaatagcatcaaaaccgcttgttgaattggctgtcggcccaattgcagttatattgttggggattgtcgctaatcttctctatgcagtcggtttatggcaggttggctaaatcatcgaaagaggggaagtttccgaatgttgaaagacggaatgacctatatgcatgaacatacaacgatagacctttccaaagtaaaaaacaatgaggattgtaagttggatgtatttcctgaaaccgtcagagaatttaaaagtttatacgaaaagggcgtacggaatattgttgatgttacgaatattggaatggggagaaatattacatacgtccaaaaagttgcaaaagaaacaggcattaatattgtcttttcaactggtttctatcaagattctttttacccgatccatgtgtttcgtgaatcgaaagaaaagctggcagaaagaatgattatggagattgttgaaggaattagaggaacagatgccaatgccgaggtcatcggtgaaattggaacaagttacaataaatggacggaaaccgaacaaaaagtttttgaagcggttgttgtggcacataagcaaacaaaaaaaccaatatcaacccatacttccataggaacattaggacatgaacaagtagaattttttaaaaaacatgaagttgatttaaaccgagtggtgatagggcatgttgatttatctggggatgccgattatatattgaaaatgctgagagaaggtgtatatgtagaattcgatacaataggtaaagaaaattatatgcctgatcgtgttcgggccgaaatattgaaaaaaatacaggataaagggtatatagacaaggttctgttgtccatggatatcacaagaaaatcacatcttgtatataaaggcggggtgggctattcatatttgatagacacgtttatccctctcttgcaaacctatggaataactggtgaatcaattgataagatgttgattaaaaatcctcgcgcttttatgaaaggggagagtgaatgagcatggatacttatcctctagatagcctatcaattgaagaagccatgcatagacaatttaaattggttgatgtcatgacaagacattttcgaggagaagaattgctttcacttggcgatttaggcgttgtaaaaggaatcaataaaccgcggttcacaaaaaaaatagaagagacactagctgatttctttggcacagagaaagcaatgttagttcgtggtgcaggaacaggggcattgaggtttggttttatgagctttttaaagccgggtgacgagatccttgtccatgatgcaccgatatatccaacaagtaaaacaacgttagagtcgatggggatcttgccaatatacgcggattttcacgattctgaacaaataaaagaagccatcctcaaacacccgaagttaaaaggtgtattgattcagcatacgaggcaaaaaatagatgaccattatgatttggctgaaacgataaaaaaaatacgttccatttattctgatctagttattattacggatgacaactatgctgcgatgaaagcagaaaagattggagcgcaactcaaagccgatttgtccaccttttcattgttcaagctattaggtccggaaggtattggagtcattttaggaagaaaaaatttaatagaaaaaatagaaaaaataaactattcaggcggaagccaagttcaaggttatgaagctttagaagctttaaggggtctgatatatgctccggttatgctggcaatacaagcaagtgtcaatgatcagttagttcactcgcttaataatggagccattaagggtgttaaaaaggcttatttggcaaatgcacaatcaaaagtcttacttgtagagtttgttaaaccaattgcagaaaaagtgcttcatcatgctaatgaattgggagcagcaccccatccgataggtgctgaatcaaaatacgagtttgcaccaatgttttatagagtgtctggcacttttttatctgcggatccatcactggcaaaaaaaatgatccgcattaatccattaagaagcggtcctgagaccattttaagaattctaaacacatccgttcatcgagcaacagaagatctcagcgtaaattcttcaaaaggcgatgatataaatgaataaaagagtcattatcataatattagacagcttaggtgtcggttatatggaagatgcaagcgattatcatccttcagatgttggcgccaatactttctatcacatacttgatacggtgccctctttaaacattccgaatctcgaaaaattgggtattaataaaatattgcaccatcctaaattgaaaaaaacagatcatattgccagctatggtgttttaaacctgatgcatcaaggagcggacagttttgaaggacataatgaaatcatgggaacaaagcctaaaaagacatatttagctccttttgcggaacatatcaatcatgttaaactcgctttggaagatcaaggttataaagttaacataccgaattcagatttaccgtatctattggtaaacgatttagtggtcgtggctgataatatcgaaacagattacgggcaaatttataatgtaagcgctccgctggattatattccgtttgatgaagtattgaaaataggaagatgcgtccgtcatcatgttaaagtaaatcgcgtgattgttcttggaggagaaaacgtaacacctgaacacttgcagagatcggttgaaagaagagaagacggattaataggggtgaattcgcctaaatctaacgtatacaagcaaggatatcaagttcgtcacttaggatttggtatctctcccgaaaatcagttgccgacattggcgagaaataggggaatggaagtctctcttatcggaaaaatgcaggacatcatttattgtgaaggtgcaaatagatttccaggtgtagatacagaacaagtcatgaaggatattattcaggagatggaccgcgtcaaaaaaggcttgattgctgccacagtacaagaaaccgatttggccggacatgcacagaatcccgtccgttatgcgaatcggattgaaatggtagatcgatatttgccggaaattctccggaaaatgacagatcaggatctgctgatgattagtgcagatcacgggaatgatcccacgatcggccacaaccaacacacacgggaaaaaacatatttgctggcttatcacaaaaaattatcgcccgttcacatcggggaaagaaaaacgctatccgacattgctgcaacttctgctgattatctagggcttcgcaatactgaaaacggcagttcattccttcatttaatgcaaaaaggaaaagaggagacatactgatgtttttggaatctacattaaaatataacaaaaaattaatagaggctgcattgagttttcatcagcagggaatcatttcacctaacacttatgtattagacttggacaccgtcaaaaaaaatgcaaaagtgttaagtgaaaaagccagaaaacaggatattgaactgttttttatgacaaagcaatttggccgtaatccgttggtggcacaagctatagccgaaagcggaatcggcaaagcggttgctgtagacccgtgggaagcaatcacactcagccaaaatggaatcaaaattgggcatgtcggacatcttgttcaaatacctattcatatgatacccgcaatattggagcttcatcctgattatgttacggttttcagccttgaaaatgctcaaaacattagtagagtcgctaagaaaatgggaagaaaacaaaaagtttttttgcgtatcgcaaacaaagaggattatatatataaaggtcaagagggagggttcacttttgagcaaatcgttaaggatatcgaatcgattgaacaattagaaggacttgaaattgcaggtttaacaagctttccttgcatattgatccaagacggccttccagcagttactccgaatgtagcatccatgcaaaccgtaaaatcgtttttaatggaaagagggtataaaaagcttgagatgaatatgccaagtgcaacatcttgtgcaacaatgaaattgttaaaggaaaatggtgcaactcaaggcgaacccggccatgctttaattggaacgacacccatacatgcaacgaaacaacttgcagaaaggcctgcgatggtatatgtaaccgaagtgtcccacatatctaatcatcatgcttatgttttcggcggcggtttctatccgcgttcacatatgaaagcggcgctcgttggaacaaacaaagatcatcttaagaaggttcaagctattgaaatgacgcctgatcatattgattattacggttcattaaacacagttgaagcaaaagtcggcgatacggcaatatttgcttttcgtacacaagtctttgtcacgaatgcacatatagccatcttaaaaaacgttgctgaagatcctgaacttatcggtgtatatgattctaaaggaaatgtaatcgagtgaatgatcgttatcggcagaagtgcctgaataatggattgtcttactgaaaaaggtgtggcgaaaatgcttggcctttttgcagtgcagtttaatacagtagtcagtcttggacattttattttgtggaaaggagaaaaacgtgaaaattattcatgtatcaggttatgaagaaatgagtggaaaatcggctgatctaatggctgagctcattcaaaattcaaataatcctgttatcggctttgcaacaggttcgacaccgattggtttatataaatgcctgataaaaaagtatcggcaaaaggaaatttcatttaggaatgttactgcttttaatttagacgagtacgttggattggctaaagaaaataaaaacagctaccattattatatgaatgaaaaattattcaaacatctggatattagtcgaaggaatatcaatatccccaatgggatggcggaagatttggaacaagaatgcctcagctacgacagacttgtttctgaaaaagcaattgacatacaaatattaggaatgggattgaatggtcatatcggttttaatgaaccggggacaagctttaaaagcagaacccatatcgttgatttggatcaatcaacccggcaggcaaattcccggttctttcgttccttggacgaagtaccgacaaaggcattaacaatgggcattgaaacaataatggaaagtaagcggatccttctgctcgtgtctggaaatgaaaaatctgaagccttggcacggctgctgaacagcacccgtgtctcccaagagttccctgcttcaattttaaggaaacataaagatgtgacggtgatggcagatgacgcagccttaaataaaattcattaaattgaatgactgacaaaatcggttaattacattgaaaatttacacaaggcattgctttgaggtatcttctagccatcaatcagccaaaaaacgactgaatatagcaaatttccatcttgttgataaggacttacatatacaggttttgattgtcctcatattgtttactcgaacagttgaaaaggagagaagagtggataatcaattctaggcgagaggaagccatcatcctcaagaaccgaccgttcatattgatgattcataaaagaaaaagcagcctttttttcggctgcttcttttgaatcaagcttgcgtttacagcgtatcacatttaactccgacaacgccgtcgatcgctttgatatcgtaatagacatcggtgacataccttttcttatgaaccatgattttcgtttccatgatcggaaattcattatcgcgcatatcatcgatccggacggaatgaatccggatttttttcgctttcatttcctttaagatatccgtcagtttatccttgtcattcagggacatgcggacgcggatttctttttcctgcaagcggttgggcccgattttgccgacgatccacggcaaaaactcgacgctgattaaaatgaaaatcagactgacaaacgcttctttataaaagcccgctccgatggcgacgccgaggccggccgctccccagatcatcgctgaagtggtcaggccggaaatgacgtcgttgcttttgcgtaaaatcacgcccgctccgatgaagccgatccccgatatgatttgtgcgggaagccgcaaagggtccatcatgattctgttcgaccttggaaaatggtatgccgcatcaatgctgatcattgtcagaacacaggaactgatcgcaatcacgatgcacgtttttaagccgagcggcttgtttttcagctccctttcgagaccgatgaccattccgattaatgttgcgattccaagctttaacagcgtttcagtttcaatatgccaatccatgcccatgatctcctttccgacaatatcttatatgattgatatgattttctcacagacgccctggatggacaactgtttttgaagtgccgggggatgtcctggaaccattcatctgcaagaagcctatactcctatcattatattgccggcgtggcatcaaaagaattccgtctgagcaaaaaagccgccggatatcgcccggcggctttcgtaacctgatcatttaagaatgttcttcctcatgcgtctgttccatttcttcaaacatatctcttgcctcttttgccggtttgttcgtgatcatgctgacagcgtaaacgacaatcaagctcaggaagaaaccagggatcatttcatagatacccgtcttctcctgcaggccggtcagaatccaaatcagcacggtcacggcccctgtaatcatcccggccaatgcgccccactggttcatccgcttccagtacaagctgagaaggatggcgggtccgaatgcagaaccaaacccggcccacgcatagccgaccagatcaaggatcgtgttattcggtgtcagagacagaaggatcgcgatgacggcgacaagcagaacgctcagacgtccgacaagaacgagttccttatccgaagctttgcgccggaaaaacgtccggtaaaaatcttccgtcatggcgcttgatgtaacaagcagctgggaagacaccgtactcataatcgccgcgagcaaagcggaaagcaaaaatccggtgatgagcggatggaataatacctttgaaaacacgataaaaatcgtttccggatctttaagcgctgtacccgtctcatggacatacgccacaccggtcagtccgacgagcagagcgccgattacggagatgatcatccagcccatcgcgatgcggcgcgcaggcttcagttcttttacggatgaaatcgccataaagcggacgataatatgcggctgaccgaaatagcccagtccccaggcgagaaatgaaataatgctaatgacggtcgttcctttgaagaaatcgagcaagcttggattgatttcttcgatcacattgaaagtcggcgtaattccgcctaattgagtaaaggcaacgatcggcacgagcactaaagcgataaacataatcaaaccttgcacgaagtctgtcagactgacggccaaaaatcctccgaacagcgtataggcaattacgactgcggccgttaagaaaagaccgattttataatcgaggccaaacgccgtttcaaacagtcttcctccggacaccatacccgccgacgtgtacaatgtgaaaaacaccatgatgacgatggctgatgccaggcgcaagattcttgttgtatcattaaaccgattttcgaaaaagtccggaattgtaatcgcatcgtttgctacttctgtatatgtgcgcagccggggagcgaccaccaaatagttcacataagctccgattgttaaaccgacggcaagccaggcgcttgaaagtcctgtcacatacatggctccgggcagtcccatcagcatccagccgctcatgtcagacgcgccggccgataaagccgtaacagcaggcccaagacctctgccgccaagcatgtagtcattcaaattggatgtctttctataggagtaccagccgattaagagcatcgcggcaaaataaatccccaacgaaataaatacttcaacactcacgtttcatatctctcctctttaaaaataatgtggcatcacctctttaaaattttcaacaatactgatttgcgggtacgaagaaaattgcagggcctcctctataaaagatcaagtattggaattaaggcgctgcctagatcgtacttagttacctaacctatcaaactattcccaatcaatcaaccgtgaaaaacatccgattttattgaaaaagggcgtgatggttttgatgagcatcattatgaaagcgtttacaaatgatatacaaagtaaaaatattctgaatattagtacgtgccgttttactgaatttttcatgtacaatgaaataaaaggcgccaaatggggcgaagatcgcggttttgttgatttagaaggctaaaatttgatatgatcagtattatatgactaagcgagaataaccttggaggtgtttttagtatgtcgcgtatttctatagaagaagtaaagcatgtcgcccatcttgccagactggcgattacggacgaggaagcggcgatgtttaccgaacagcttgacagcattatttcatttgcagaagagctgaacgaagtcgatacagagaatgttaaaccaacaacgcacgtattgcaaatgaagaatatcatgagggaagatgtacctgataaagggcttccggttgaagacgtcgtcaaaaatgcgcctgatcataaagacggctacatccgcgtgccgtcaatcttggactaataaaggagggagcgagaaaacatgtcactgtttgaccataaaatatctgaattaaaacgtctcatacataataaagagatcagcatatcagatttagtcgatgaatcttacaaacggattcacgaagttgacggaaaggtacaagcctttttgcagcttgatgaagaaaaagcccgcgcatatgccaaagaattggacgaagcgcttgatacccgggatgagcacggtcttcttttcgggatgccgatcggcattaaggacaatatcgtaacaaaagatctgcggacaacgtgcgcaagcaaaattctcgagaattttgatccgatctatgatgcaaccgttgttgagcgtcttcatgaagctgaagcggttaccatcggaaagctgaatatggatgaattcgcgatgggctcttccacagagaactcaggctttaaaaagacaaaaaacccgtggaacctcgaaactgttcctggcggatcaagcggaggctcagcggctgcggttgcggccggggaagtgccgttttcacttggatctgacacgggcggatcgattcgccagccggcatctttctgcggcgtcgtcggcttaaagcctacatacggacgcgtttccagatacggccttgtcgcatttgcatcttcattggatcaaatcggcccgatcactagatctgtcgaagacaacgcctaccttctgcaggcgatttcaggcgttgacaaaatggattcaacgagcgccaatgtggacgtgcctgactacctgtctgcgctgacaggcgatattaaaggcttaaaaatcgccgttccgaaagaatatctcggcgaaggggtaagcgaagaagcgaagcagtccgtgcttgaagcgctgaaagtgctcgaaagccttggcgcgacatgggaagaggtatcgcttccgcacagcaaatacgcgctggcgacttactacctgctttcttcatctgaagcgtcggcaaacttggcgcgcttcgacggcatccgctacggctaccgcacggacaatgccgacaacctgatcgacctgtacaaacagacgcgttccgaaggattcggaaacgaagtcaaacgccgcatcatgctcggtacgtttgctctgagctccggctattacgacgcatactataaaaaagcgcagaaagtcagaacgctgatcaaaaaggactttgaagacgtatttgcaaactatgacgtcatcatcggaccgacaacgccgacgccggcatttaaaatcggcgaaaaaacgagcgatccgctgaccatgtacgccaacgacatcctgacgattcctgtcaaccttgcgggcgttccgggaatcagcgtaccgtgcggatttgcgaacggcttgccgctcggcctgcaaatcatcggcaaacactttgacgaaagcacagtataccgcgtcgcccacgcattcgaacaggcgacagaccaccataaagcaaaacctgaactgtaaggggtgaaaaaacatgaactttgaaacggtaatcggacttgaagtccacgtggagctcaaaacaaaatcgaaaattttctccagttctccaacgccattcggcgcggcggccaacacgcagacaagcgttatcgacttaggctatccaggtgtactgcctgtgttgaacaaagaagccgtcaatttcgcgatgaaagccgcaatggcgctcaactgcgaaattgcgacagatacgaaattcgaccggaaaaactatttctaccccgacaacccgaaagcttatcaaatttcacaatttgataaaccgatcggcgaaaacggctggatcgaaatcgaagtcggcggaaaaacgaagcgcatcggcattacccgccttcatttggaagaggatgcgggaaaactgacgcatacaggcgacggctactcccttgtcgactataaccgccagggaacaccgctcgttgaaatcgtctccgagcccgatatcagaacgcctgaagaagcttacgcctaccttgaaaaactgaaatcaatcattcagtatacaggcgtgtccgattgtaagatggaagaggggtcgctccgctgcgacgccaacatctcgctccgtccgatcggacaagaggagttcggtacaaagacagagctgaaaaacctgaactcattcgcctttgttcaaaaaggccttgagcacgaagaaaaacgccaggcgcaggttcttttgtcaggcggtgtcattcagcaggagacgcgccgctatgatgaagcgtccaaaacgacgattttgatgagggtcaaagagggatctgacgactaccgctacttccctgagcctgatcttgtcgagctttacatagacgacgagtggaagcaacgcgtgaaagacagcattcctgagcttccggacgagcgccgcaagcgctacatcgaagagcttggcctccctgcctatgacgcgaaagtgctgactttgacaaaagaaatgtccgacttcttcgaagcggccgttgaaaaaggcgcagacgcgaagctggcgtcgaactggctgatgggtgaagtatcggcttacttgaacgcccagcaaaaagagcttgcggatgtcgaactcacacctgaaggccttgccggattggtcaagctgatcgaaaaaggaacgatttcatcgaaaatcgcgaaaaaggtcttcaaagaattgattgaaaaaggcggagacgcagaaaaaatcgtcaaagaaaaaggccttgtgcaaatctctgacgaagcgacgctcagaaagcttgtcacagaagcgctcgacaacaatccgcaatcaatcgaagactttaaaaacggaaaagaccgcgcgatcggcttccttgtcggccaaatcatgaaagcctcaaaaggacaagcgaacccgccgatggtcaacaagcttcttcttgaagaaatcaataaacgataaaaaacagactatgcctaattaaatggaggtcctcatgttgaggaccttttttatttgtatgaaaatacaaatgaaaaaacttctttctgttcaataatattaaaatttatttgaattttatttaataatatattatcatttatttgaattttgtttttaaatttgttaataagaggggctgtctatggaaagaaaggatgtacccgagtggatcttagctttagaagaagaagatgtagaatttattaaaaactttatgctgaaatctggatctttaaaagaaattgcaaagagttatcaagtatcttatccaacagtcagggttagattggatcgattaattcaaaaaattcaactaattgacgagttagaaaatgagacttttgttaactttataaaacagttagctatcgatgatcagattagtctggaaaatgcaaagctaatcattgagaaatacaaaaaagagcggggtgttcataaatgaatcctatttatatactactcattggctttacaatactagggattcaatattttttatcgaccagaaatcataccttttggggagctatactgcctacagcttatatcgtttttctcgtggcattatccatttatgaaggaaaatctttcgcatcattctttcttcctcttatcggcggattggctttattgttgggagaatggattaaaggcagagaagctttgaaaaaaaagcgggaaagagaaatgagaataatgaaagccatggatattaaataacaggatcagcctcaaaaggacagaacaagctgtttcaaaaaaaccttggagaatgactctccaaggttttttcattattccacgacaggcgtcaaagaatcgccgtcccatatctctcctttattcagcgtccatggatgaagatagagggtgtccgctcccttattcacagccgggctccactcatcgttccacgccaggaagtacgtcgttttcgggtatttttctttgatggcatggataaaccgcgcgtaatccagcccgccgtttgtcgtctgcggtccgacttctgtaaaggcaaacggcttgttcagcgatgtgagctcttcgtagccatcaatggcgtacgggtcatcaaaataagcgtcaagcccgacaatgtccacatatgatgcgcccggataaaagtccgttttaaagtctctgttggcgtccggcgcatacacccacaagagatgatccaggcctcttgtttttgtcatatagtcatagattttcacatagagctgtttgtacaaggagattctttcgctgtctttttgattatattgcgtcagcccccaccagaaccattcgccgttcatttcgtgaaggggtctgaatagaacgggcacgccttcattttcaagctcctggaggccgtccgcgattttgctcagcatcgcctcaagccgctttccttcaggagtggaagaatctaaaattctctcatactggctgtttgaaatctgagttttataatgacccgaagtaaacgcggggtttgcgaggtgcatgctgatttgcggaatgcctccgcttttccagtatgcgatcaaatcacggttgcagctgtagtcaatcgtatcggcgatcttttccggctccagccatcctcttgcataatcgcagccgtatatggccggcagctgtcctgttgcctgtttgatccggtcggcttcagccgttgaaaatgtgtcgaggctgtatcctccgaacgccccggacatcacccggctttccgtccgattgggcaggtgggcgagccagttcatcaccgctttcgtcgtcggctgggcattcgggttcaccggagaaacggtgtgtgcatagctcggctgcgaaacggcaaaagcaaggagcagcgcgaagattgaacaaacgatgttttttttcactaaggtaaaaccccctgaaacatatagattgtcttaagcgatcttattatacatgctgcttccaaaaaatacatggtcagatcgtcttattgtaagggaataaaaaaacagccataaggctactttatgaatgaaggaaacgggtgatcattccatatagatgctgaacattgtcctgatgctgcaagtttgtcagcatgccttggagcacgggtgcgcggggcgaatcctttctcagctcttcctcgatcacatccagtgtaatgagaatgtcttccgaaagctccggctgacgtttggcatcttcaagctcccgcaaaatcgtatgtttatcggccgtattgccggcgttccggtaatagctgtacgtccggccggccaagatcggctgctccccgttttgaaccatgccatcaatcatgtcatcgattcttctcataataaaatccgcaagttcgtaaaaatcgatatccagttcattaaagataaacaaattttgataagactgcacgatgccttgaacgatcacggacaagtctgacagataaggcttcacaatgtcaccgtaggcggctgacagcgcgttttgatacgtctcgtggaatttttggctgacatttttaaaatattcttcgatcttgctgttttccggtatgctgtgttcgctgatcatcacgagaataaaatcgcggtgctccttgctctcgctgaattgataagcaatctgctccttgaacgtttccttaggagggaaattcttctgctgaatgatcttcatattttccatcattcgatcgatataatacttaatgattgcgagcaaaagagcttctttcgacttgaaatgcaggtagaaagccccttttgagatgttgcattcattggcgatgtcttgaatcgttgtggaagcaaaaccgtttttcgcgaacaggtgcaggcctgctttaatgattttttcttctttttctgtcatgaatgtacccctttaacacttctttaaaattgaataaattttaacatatataagttgacgctgtttacttttgaagtttattattgtatagaatgaccagtcagtcaatctgtattctgaaaatgatacacaatggaggtcgtaatgaattctatcattaattttgtactaaagaacaagttcgctgtgtggctgatgacgattattgttacggttgccggcatttatgcgggtttaaatatgaagcaggaatcgattcctgatgtgaacatgccttatttgaccatcagcacgacatatcccggagccactccgagccaggtagctgatgaagtcacaaagccggttgaacaagccgtgcaaaatctggacggcgtcagcgttgtgacgtccacatcgtatgaaaacgcatcatcggtgatgattgaatacgattatgaaaaggatatggacaaagcgaagacggaagccgctgaagcattggcgaatctcgatctgccggacaatgcgaaagagccgagcatttcgcgctacagcatgaattccttcccgattctcgcgctcagcgtgtccagtgataaagacgatcttcaaagcttgacgaaaaaagtggaagacagcctcctgacgaagcttgaaggccttgaaggcgtagcttccgttcagctttccggtcagcaggttgaagaagtcgaattttcatttaaaaaagacaaattgaagcaatacgggcttgacgaggatacagtcaagcaagtgattcaaggatctgatgtgacgactccgcttgggttgtacacattcggcaaagaagaaaaatcggtcgtcgtcagcggcgatatcgacacaattaaagacttgaaaaatatgagaattccagcggcgtctgccggaggcgcaagcgcgcaagccggagcgcaaagtgcgcaggcggcccagggggcgcaggctcaagccggggcacagagcgccggacaagctcagcaaagcgcgggagtcccgacggttaagctgtctgacatcgcaacgattaaagatgtcaaaaaagccgaatccatttcacgaaccaatggcaaagacagcatcggcatcagcgtcattaaagcaaacgacgccaataccgtcgaggtagccgacaacgtaaaagctgaactcgaacaattcaaaaaagaccacaaaggcttcaaatacagctcgacatacgatcaggccgaaccgatcaccgagtcggtcgagacgatgctgagcaaagcgattttcggagcgatctttgcggttgtgatcattctcttattcctaagggatattaaatcaacattaatctcggtcatttcgattccattgtcattgttaatcgcactgctcgtcctgaaccagcttgatatcacgctgaatatcatgacgctcggcgccatgacagtcgccatcggacgggttgtcgacgactcgatcgtcgtcatcgaaaacatttaccgccgcatgaggctgaaagatgagccgctgcgcggaaaagcgctcgtgcgcgaagcgacgaaggaaatgttcatgccgatcatgtcatcaacgatcgtgacaatcgcggtattcctgccgctcgcacttgtcggcggtcaaatcggcgaattgttcatgccgtttgctttaacgattgtattcgcgctcgctgcatccctcttgatcgcgatcacgctcgtgccgatgcttgcgcacaccctcttcaaaaaatcattgacaggcgcgccggtaaaggcgaaagaacacaagcctggggtactggccaacttctacaaaaaagtgttgaattggtcgctcagccataaatggatcacatcgatcatcgcggttctgatgctggtcggaagcttgttcctcgtgccgctgatcggagcgagctacttgcctgccacaaaagaaaaaatggtgcagatcacgtacacccctgaaccgggagaaacgaaaaaagaagcggaaaaggaagcgcaaaaagctgaagaaatcctattggaccgcaaacacgtcgatacggttcagtatacgttaggagcgggaaatccgctgatgggcggaagttcaaacggcgcgttgttctatatcaaatatgaggaagacacgcctgattttgatcaagaaaaggacagcgtcttaaaagacattcagaagcaatccaaacgcggagaatggaaaactcaggatttcagctcctcaggcaacaacaatgagttaacgtattatgtgtacggggattctgaaaaagagattaaaggcactgtaaaagagatcgaaaagataatgaaagaccaaaaagacctgaaaaacgtaagctcaggcctgtccagcacatatgacgaatatacatttgtcgctgaccaggagaaattaagcaaactcgggttaacggcatcacagatttctcaggcgctcatgaaagaaacatcgcaggcgccgcttacaaccgtgaaaaaagacgggaaagatcttgatgttacgattaaaacagaagaagaaacatataaaagcgtcaaagatttagaagacaaaaaaatcacaactccgaccggccaggaagtgaaaatcggcgatgtcgcgaaagtgaaggaaggcacgacatccgacacaatttcgaaacgggacggcaaaatctatgccgatgtcacggcggaagtcacatcagacaacgtcacggccgtatcagtcgacgtacagaaaaacatcgacaagatcgacctgcctgacaacgtcacaatcgataccggcggcgtatccgctgatatcgaagattcctttacaaaactcggactcgcaatgcttgcggcggttgcgatcgtctacctcgtgcttgtgattacattcggcggagcactggcgccatttgcgatcctgttctcgctgccgtttaccgtcatcggcgccttggtgggactttacgtatcaggagaaacaatcagcttgaacgcaatgatcggaatgctgatgctgatcggtatcgtcgtcacaaacgcgattgtcctaatcgaccgcgtcatccataaggaagcggaagggctctcaacgagagaagcactcctggaagccggctctacaaggctccgtccgatcctgatgacggccatcgccacaatcggcgccctgattccattggcgctcggatttgaaggcggcagccaggtcatttcaaaagggctcggcgtcaccgttatcggcggtctgatcagttcaacgctcctcacccttctgatcgtaccgatcgtatacgaagtactggcgaaattccgccggaaaaaaccgggtatggaagaagagtaagatggtataacatcaaccccttggaatggacacaggaaatggtccattctaaggggttttttctttgaagagacgatcgtcggtgtttaacaaaaatatcctgtgttatgctttgttagaaaaggcaacttgatgaggaggcattgaatggaatcgaaaggaaacagcgaaccaagccccaaaatcgtaaagcggctcacctggatcataccgatcgtgttgataggagtcatttttctcttaaaaaatatgagaaatcctgtgactgatgttttattttatattgtatgtgcaggtgtcatcatcttagtgattttccgcatcataaaagagacaaaaagcagatgaagcaagttttgaacttgtcgataaaggttgaagtgatcttcatcgacaagcttttttaatgctgcgttctccagccggcgaagaagcggctaatcatgcggattgatcacagccagcagctgatgatcttcccattttccgttgatcttgacgtttttccgggcgatgccttctttgtgaaaacccgccttctccagcacccggatcgaggcaatattacggggcatgacgccggcttcgatgcgatggagcttgagatcgtgaaaggcgaactcgaccatcagcttgacggcttcggtcgtgtagcctttgccgttgtgcttctgatccaaaaaatagccgatgaaggcgctttgcaaggaaccgcgcagcacttggaaaaggttgatcgttccgatcagcgcatcgtttgccggatcaaagatgccaaaataataatcttcatcgttctccatattttcatataatctttgaagcctcttcttttgtccttcgattgtataaaactcctcgttccgctccattgaaaactgttcaaagaacgggcggtttgcgttctgcaattcgaggcatgcctcggcgtcttcagccgtgagcggcctgatgtaaatgtttgtcccttttttaatcatggaaagtctccttttataaagatggaatgcggtcggctcttttcatcaactcttcaaaatacgcaaaaaattgatccctgtcgacttgatcaacgactttgaccattctgccgtcaggatgctcttctgtcgttccttggcgcgggctttgtgtatggacaaccgccttgatgctgcgcgagcgtgtcatatcgactgtgccgagcgtcagcgtcgtcagcacatcccaaaggtagtatgtcgaattcgtttcgttatggacaagcggcggacacatcgcatagcattggccgataaagtcgatcccgatatgctttctgaggctcgcccaatgggagcggatttcgtttgtcagaggcacctggttcgtgctttcaagcgcgaccatttcgatctgaatgtcatgtgcgaacaccgtcttgacgctgtaagggtcccaaaaggcgttccattccgccgtcccgtcgtgctcaggctcttccacatttcctttctcaaggaaggtgccgcccatccagacaagcttagcaatgtgctttatgatcgccggctcttcctcaagcgcccttgccaagtctgtcagcggaccggtaaacagcagtgtcaccggttccgggctctgtttcacgcattcaaccagatgaaggtgagcgggcaggtctgacaccggagtccggacttcgcctttttcatttaaaatcggcagggcgtcgacataaaaggcgtgcatgcgccactccttcgggaacgggtgcacccctcttgaatcggatgccgcagtctctacctggtacgaaccgaagcggtcaatgatttttcgactggcactgagagccggctccaaatagcaatccgccggtataacggatgttccgatcaatttgacatcttccatttgcagcagcagaaataaagagacgagatcatcgacgcctccgtcatggttaaaatatacgggctttttcacagcaacatctccttttttcttaatattgattattttacatcaattagatcctgaagtcttttttaccattaattaggatattttatctaaaattaaacaaatgatgatacccattttgttgcgattttttcaacagctagtataattaaaggttgttggtaaagaaatgatacggatactctaataggatgatgaaaacatgaaacgtgcacgaatcatatacaatccgacttccggacgagaaatcttcaaaaaaaaccttgcccaagttctgcagaagttcgagcaggcaggctatgaaacgtcatgccacgcgacaacaggggaaggggatgccgtacaggccgccagacacgccgctgagcgggaatttgacttgattgttgcggccggaggagacgggacattaaatgaagtcatcaacggactggcgccgttggaacaccgccccaagctcggagtcattccggtcggaacgacgaatgactttgcgagagcgctcggcattccgcgcgaggatattttaaaggcggttgacacaatactagagggagaggcccgtccgattgacatcggccgcgtcaacggccaatatttcatcaatatcgccggcggcggacgccttacagaactgacatatgacgtaccaagcaaattgaagacgatgctcggccatcttgcctattatttgaaaggaatggaaatgctccttccttcactgcggccgaccgaggtcgaaatcgaatacgacggcaagctgtttgaaggagaagtaatgctgtttctcgtcatgctgacgaactcagtcggcggctttgagaagctcgcccccgactcaagcttgaatgacggcatgtttgacctcgtcattttaaaacgggcaaacctcgccgaattcatcagacttgtcggacttgccctccgcggcgaacatatcaatgacgagcatgtcatctacacgaaagcaaaccgcgtcaaagtgacggtcaaagacaaaatgctcctcaaccttgacggcgaatacggcggcgaactgccgggcgaattcgagaacctctaccgccatatcgacgtcgtcatgtcaaaagaaaaagcgagaaaattggatgattgaacttggtctaaagagctggccaagtttttcttatagcaggtgaaaaagatgaaacaaaaagcccccgttcaaaaaaatgaatattacaatgtcgtatttgaagatttaacacacgaaggagccggcgtcgccaaagtcgacggcttcccgattttcgtgccgaacgcgctgcctgacgaaaaggcgcagattaaagtgacccgggtcaaaaaaggcttcgccttcggccgcctcatcgacttgaaagaagaaagccgctttcgcacggacgcgccgtgcccgatctacaagcagtgcggcggctgccagctgcagcacatcaattacgaaggccagcttctctacaagcagaagcaagtcaaagacgtgctcgagcgaatcggcaagctcgatttaagccggatcaccgtccacccgaccctcggcatggaagacccgtggaactaccgaaacaaagcgcaggtccctgtcggcgaaagagaaggcggtctgatcgcaggcttctaccagcagcgcagccatgagatcatcgacatgaacgaatgtctgatccagcagtcggaaaacgaccgcgtcgttcaagcgattaaagaaatttgcggcaaatacggcatcaaagcgtacaacgaagaacgccacaaaggctggctcagacacatcatggtcagatacggcgccgcgacaggcgaaatgatggtcgtcttcatcacaagaacaaacgacttcccgcacaaagcgaaaatcgtcgaggagatcaccgcggcattcccgcacgtcaaatcgatcgtccaaaacatcaacccgaaaaaaacaaacgtcatcttcggcgacgaaacaaccgtcatcttgggagaagaatacatttacgacaccatcggcggcatcaaattcgccatttccgccagatcgttctaccaagtcaaccctgagcaaacaaaagtgctctacgacaaagcgcttgaatacgccgaactaaacggcgaagagaccgtcattgacgcgtactgcggcattggcacgatctcgctgtttttagcgaagcaggcgaaaaaagtgtacggcgtcgaaattgtgccggaagcgattgaggacgcgaaacggaatgctgagttgaacggcattgagaacgctgagtttgaagttggcgaagcggaaacggtcattccggagtggtatgaggaaggcattgcggctgacacgctagtggttgacccgccgcgcaaaggctgcgacgaggccttgctgcggacgattttggagatgaagccgaaacgtgtagtgtatgtgtcttgcaacccgggaaccctggcgcgcgatttgcgggtgctggaggatggcgggtatgtgacgcgtgaggtacagcctgttgatatgtttccgcatacggcgcacgtcgagtgctgtgcgttgctaataaaaaaatagaagatatataagggtccgaaaatcggtaaaagattctcggacttccatcttcttttatctcaattcgttcaattaatttgtgaagcatttcttcatcaagaataggattttgaacgaaattttcaaggtttcgaattatttttgtaaaatcaatcgtttgtttttgttgaagtaatcctttttctatctttactttttcctcatttaattttgcaatctgattaccattatcttcaataagtaatcgatattcatcatcttgaatttcgccccgtattttcatgcgaagagcaatagttttatctttctttaagttttcaatttccttgtgaattacagtaagtctcttttgatcacgttgtatcagtttggtaatctttttctcaatatcatgctgaattgattttgttgagagttttgaaaacatctccttaatatcatctgaaataatcttaattaattcatcttctttaacaaaatggtcagagcattgtgtacgaccatgtttgttgtaccctccacaaacatatccttttctactctttttgaagtgcatactcctaccacaatctgcacagtaagatatatttgagaataggtgtttttttgcatgtggtcgtttacgttttctttcggcgattagctgttgaacaacattaaaatcttccttagtgataatcggttcgtgtgtgtcctcgatgattacaaaatttgatggatcattctttttccttttttcagatgtgacatttattgatgtctctctttgttgtacgagattaccgatgtagtgtgggttttctaggattatccgaactccagatccatgccaaagaggacttgcatttctcttccctgcaaccatagatggagttggtaatccttcttctaaaagttccctcgcaatactatcaaatcccataccagaaagataagaattgaaaattcgacggactatatttggtgtaaaatcatcctttatttttaaaacaccatgttctacatagtatccataaggtgggatagaacccttaaatttaccaccttttgctcttactcttaatgcagtttttacacgttcacttgttcgctgtgattcctgttcgtacatccaagcgtataatccaaacatctgcgtgttgccagaaagtgtgtcaattgctccatccaatgtaaggatatgaatgccacgattttcagcaagattttttatttcatatgaaagttgtccgttcctagctaatcgtgatagttctttagctaagataatgtcaaacttattcattctagcatcttctatcatacgttttaattggggtcgtttctttgttttcgtaccggattgaatatccaaatagatatcgtataggtcccaccccttttctgataaaagattcatgaatagttccttttggttatcaagggattgcttttgttcttctttgttcgttgagacacgaatgtaaattgctgatttcatgccactatctctccttccttgttagaagagtcagtggaattcaccttattatcatcatagatttcctttataagtacgtcaattttttcatttagaatggatttgaaaatgtcttcgagggtaattttggattggttattgaagattctttcgatgttcattatgtttcctcctgaggtttaagttggggtttgtaattattgaagtttaaaacgttgaggggatttgtaagggggagatttctttatgatttttggattctgtatcaacatcacttcctttctacgaatatattatcttataaatctatcataatcaggatgatttcataaatcaaagttcttaggttcgaggacgctccaattttaagtgagttgctaggggatggatatgaagaatatactatggaagagtaaaataattgattagttgggcgtatatacgcccatttttgtcaatctttattaatttgaaaatgaaaaaagtaccaaattaggtgcttggtggattaaataaattaaacttataataattttgctctaataacaactccattttttcaaaaacattcaccgatgtaacgaaacttctaagtaaagaatctttctgtttatttgtcattctatccactaaatttggactaaaaaacacattttctgtatactctatgattaaatagtttagatgctgagtaaattcttcgtttgttaatccatcaagttgatcaaaatattccttttaaactttattatcactcagaaggtgcgataatacaattacagtctgattttctattggatagacactcacatggatagaaggcattttattttcactcttatcatggtaaatatcatttatttccttcccagtataatcgaattgaactgcaaatgctgaacttgtggtaaattcaacttcatagtctaatgttctgctaatagttcttaaaatttcgaaattgcccattaaataattttccttaaataaattgtagtcctttgcgtaatcttctacatctaatacagttactctatacgtattaaccatgattggatctaacattccagcagggaattttttaaataaacttctaatgttgtttaaaagtctttgttttctatgatactctaaagcggatgctctaaaagcaaacaaaaagttctgaattggttcaccagtatactcccttagttcaataggcttaaatagctcagtatcatgataatcacaaaagccaaaaaatgtactagctttattcctacttatttttttgaacactgcatgatgacctttcttcttagaaatctccccacttatttgataaacatggccatccttgcttatcctgtttaaaaacctgttgttttgtattgaatgagcccctttaattactgatgaacattcctctttattaaagcctaaacatgttttaaaatctgctttttcccactctagtattgccatgtgattaatacgttgttcggaatatttatattctgctatttctttatgtctagcttctcttgctttttggtaacagcaaaacttaaatttatcttcggaaccacatggacacaattcgtaagcatctatcttatttttctctatttccttttttgaatacaaaagttttaccccctttgttaccatattatatcaaactacaacttttcactaaatctgaaagtaatcaatatgattatcttattgattcaaccgtagagcatattagtctttacggtttttttgttgctagtttattagaattactatcaacttacactaactttccttttgtaaagctaatttgtagttgtaggactgctcatgtgaataattccctttacaactacatagcatgttctacttcatgatcacattgtatcaaaacaatgtgttaggaagtcatataaattagttcgggtcgggaaaagttatacatctaaaccccttggtaataaaggtatttcctagtcctgtgaacgtaaatcaaaggagatggttattttgattcacacatttgaattgttgctagttgttacgtatttcgatattcgacaccttttttctatgtacggtattaaggtagacaaataccattacttcggtgctgctgttgaacaacttaatgaagaaataaagaaggtttttccatcttatgccgtatcttatatctgggatcaagcaactggtgattgcaacttacaattaaaggttgatgcggtaaaaatgctaagcagaggaactatagtagaagatgactatgttctggttgaagcggatattcgtaaattccttacttggcactttggacaatctgattatttcgattctcatgttctaaccagaattgattataagcaggactgttatgttccagattcaaaagataggaaattgttatttcatttgctagaaaaatacacgaacagttatagacacaaagagaaaatcaaatggggaaaagatgaaaatggaaatccattcaaatatgaaacatcccaataccacaagaataaaagtgtcgagtttgtgatttatagtaaggaggatgagcggttagcgaaaggtgaagaaattcagtcttatgatgaaaatgtagtgagatatgaattgagactgaaaaacaggcatcttaacagcatgaaacgaacagataagggagtaggtagaccgaaacaactgaaaacctacttttctttacaattgcagcaggaatacatggaaaagcatatcctacctatcgttcacaaaggtgattattacaaaatcactgaagctgaaaagataattgaaaacagccaattctcaaggaggaaaaaagcaagtttacgagagttcttagttatgatttccaaaggtagcattgatactccactgaaaaagaaaaaggaagaaggaggcatttcaaaacctacttatcggcaataccttcgtgacctttcaagcctcggaataaaccccatcctaattcccaagaatctctccaccgaaaatcacacttcattcccaagttacctgaaaaatccatttacaatctaaatgtacatgataggcaatttgaggtgtctaaattgtgtcgtacctaacacgataggcaccttattcgtttagaaatagtgcttgtattatgttcgataagcaggactactcaccatactcattaagttctttatactcttttgaatctataacttgaccacctaattcgctaaaagcatctgctaatgcagtatctatttcactttcatcaaaatcatctggaagctcaacatctaaaacgattcttacaaatttcatcctatatcctcctaagattagttcgtatttaagcattttcttattaagagtataaaaagaataatgtttcatagttcattatgattattaccaaccctagataatataaaacaaattaaccgacaaattacggattgaatttgtcggttagcatacagctgattagtaacggataatggaatccgttacaagttacatttgtcggtctctcttccaggcttataggaagccatagcatcgcatagtgcttgtgcgatgatgtgttggatttttagatgaggatagtattcttcacagaaactgctaaattcttcatagatggcattgttcattcggatgcttttattggagtaagttgcatctctactgtaaatgcgttcatctaggaacaaaagccctttgttttcaaagtgcttaattaacttcttcatagtatcttcatgctgtttgaagaaaggtacttcatcactattattacttaggtcattcgtcaacctttcttcttctgaacgaacaaatggatagtatttcttgtccgctttatgataaatataatccccttcccgcatgattttgctaaaactactggaaggaatgccgataagatcactaatttcctttaggtcatgatctagtaatagtttattgacttcttgtactctttttgatggtgacattgtaaggaatgtttgtttgtccattagtacaacccctttcgttatatgaagttaatgtattatagatgaaaaaaacattaatataactgtacttttcagtcgttttaattttttgattggttttaatgctatagattgacttcaacgcttaaaagtcatatactgtatttaacaattgatagtcaaatatcagatttgacatttgaatggaggtgtaacatgcaactcggtgaggttgcccaaattaaaacgggactggtactaagtaggaagaaagcagaaattgaatatgatgcaaaggctacatacaaacttctatcactaaaaaatattagtgaagatgggatgatagtaaacgaatctttcgatgaatttacaagtaatgaaaacctagatgaccattactttaccgaggaaggggatgtactaatgagattaagccaaccctactccacggtatatattgataaaaactattctggtttattgataccgtcgtactttgctattattaaagtaaacaatacagaggtcttacctcaatacattgcatggtatcttaatacgaagtatgtaaaaaatgaattagagcgttctcaagctggtagtaggattcctagtacaaatcagcatacgatcaagaacattccggttgtattagcacccattaaacaacaacagattttgattgagttataccaactacatcaaaaagagaaactgctttacaaaaaattaatagaagaaaaagagttactctttcaaggaattacccaacaattattaggaggaacaaagaatgattgaacaaacaacacaggaaaaaattaatagtgtgttatggcaagctgcagacactttcagaggaaaaattgactcatctacatacaaggattatatcctaactatgttgtttattaagtatttaagtgattcgtataaagagaaagtagaagagtatacaaaacgttataatggcgataaacagcgtgtacaacgtgctttatcaagagaacgatttgtactagatgaggaatcaacatttgattatctatatggaaaaagaaatgatccggaaattggagaaatcattaacaaagcattggaacgtattgaaaatgaaaatacaggtaaacttcgtggtgtatttcgtaatattgactttaacagtgaagcaattctgggtaaggcaaaagaacggaatgcaatgctttgttcattattggaagactttaatcaattatcattaagaccatcgcaattaggtaatgaagatattgtaggaaatgcttatcaatatatgattggattatttgcctcagatgctggaaaaaagggcggggagttttatacaccagctgaggtttcagaagttttagcacgattggtaaaaccaagagaaaatgatcgtatttatgacccaacttgtggttctggatcgttgttgttaaaagtggcaaaaaaagtaccaagtaagaaagttgcgatttatggtcaagagcgtaatggtgccacacactccttagctatcatgaatatgtacttacatgggattgatgatgctaagattgaatggggcgatacattagcgaacccattgcatttagaagatgacaaactaatgaagttccaagtcattgttgccaatcctcctttctctttagataaatgggcgatggggtttgctggtgaaggaacaagtgataagaagtttaagatggagccagggcttgatccgtataggagatttgaatggggggttccaccaagttcaaaaggggattatgcttttgtccagcacatgctatactcattagcagaaaacggacgtatggctacaattttaccccatggtgtacttttccgaggagcaagtgaaggaaagattcgtaaacaaataattgatatgaatctattagatgcagtcattggtttaccagaaggtttattctatggtactggtattcctgcttgtatcatgatattccgaaaagaccgcacccgtaatgatgtcctatttattgacgcatctggagaaggaaattacgaaaaaggaaaaaaccaaaataaattgagagagctggacattgaaaaaatcgtcgaaacgtttgagaagagagaaacgattgataaatactcatatgttgctacattagatgaaattaaagaaaacgactataacttaaacatcccacgatatgtagatacattcgaggaggaagaactggttgatatggaagcggtgaagacaaatattgttaacattaaaaatgaacttcaagaagtagaagcacagatggaaaagtatttgaaagagctaggattgtaggtgaaaaaatgagtacagatacacttaatggatggaaaaaatttaaattaagtgaagtaattagttttttaggcggtaatgcttttaaaagtactgatgcacaagagtatggtatacgctggttgaaaatagctaatgttggttttgggaaaatagaatggagcaacttagattttttacctaacgagtttttagaagaatattcaaaataccttcttagagaaaatgatattgttatggctcttacaagaccaattttgaatggtaaattaaaaatagcaaaggtgagaaaggaagacacgccttcactattaaaccaacgagtagcaaaaataacagcaaatgatggtttttctttagacttcttatattttgtactttcaaaaaggtcaaccgttatgaaaatcgaaaatgctatagctggtactgatccacccaatttaggtttcaatgacttaaagaatgtgaacatattagcaccaataaatattaaagaacagcaaaaaatcgcaactatcctttctacatgggacaaggcaattgagctaaaagaaaagttgattgagcagaaaaaagaacagaaaaaaggcttaatgcaaaagttgttgacgggtgaagttagattacctgggtataaagatgaatggaagattgtaaggttaggagagattgggaaaacctacaacggactttctggtaagagtgcagaggactttggtgaggggaaaccttacattccgtataaaactatttttgatgatgctaaaatagaccttaataagttagattatgttgaaattgaagctggtgaaaatcaaaatagtgcgaagtatggagacatatttttcacaacttcttccgagacccctgatgaggtagcaataagctctgtcttgttggatcatgttaatgagatttacctcaatagcttttgttttgggtatcgtttgaataatttcagtgtcttacttcctgagtttgctcaatttctttttcggagtgatggatttagaagaaaaacattcagtttagctcaagggtcaacacgctttaatatatcaaaaaacgaagtaatgaaaattgaagtatctttgccttcaattgaggaacagaaatcaattgctgaaatattgagctattccgataaagagataaaattgcttgacaaacaagttgattttttaaaacaacaaaagaaaggtcttatgcaattacttttaactggaaaagtacgagtgcaggtgtaatgcctacacttactttccctttttgagaacggaggtgcaaaatggcaagggagaagagttatgatgaacggtttattagtcaagttcccgcaatcgaagtattgcaaaagatagggtatcaatatatatcaccagaaaaagcgaatcaattacgttcgaatctccatgatgttttgttaagaacagttttagaggagaaattgaaagaattaaattcctatgaatacaaaggagaaattcgcaaattcagtgataccaatattcaacaggcgattcgtgatttagatgagtcactaaccaacggattagtgaaaacaaacgaagctatatatgaaacaatcatgaatggacggagctatacagagtttttgccggatggttcaaagaagtcgtttacgattcaatatattgactggaaaaacatagaaaataatgtatttcatgttgtggaagaattcgaagtggaacggatggatgggcgaggaaccgttcgtcctgatattgtactttttattaatggtattccgtttgctgtcattgaatgtaagcgagcatcaatttccatgagccagggaatcagtcaaatgattcgcaatcaaggaaaagattatgttccacatttgtttaagtttattcatttggtcatggcaacaaacaaaaatgaaaccatgtatgctacttgtaacacaccgaagaagttttggtccgtttggcaagaggaaaaaaaggagtggcttgagtcttggttggaacaaacgatagagggcagactcgcaaccacacaggataagaacatcatctcactgtttcatcctgagagattgcttgaaattacccaattctttacgctgtttgataaagatgtaaagaaagtggctcgttaccaacaatactttgccattaaagaaatcattaaaaccattgaagaacgagatgagaatggtaatcgtcaaagtggtgtgatttggcatacgcaaggttctggtaagtcactcaccatggtgatgttagctaggtatatcttgtcagaattacatgattacaatccaaaggttgttatcgtaactgaccgggtagagttggataaacaaattcataaaacatttagccatacaaggttaaaagcgagccgagcaacttcgggggggcatttggtcgatctcatcaatgacaacaactcggatattgttacgacgttagttcacaagttcgattcggcatccgttaaacaaaagccaattgaatcaagagatgtatttgtactggttgatgagtcacatagaactcagtatggagagctaaatataaaaatgaagaaagtctttccgaatgcttgttacttaggttttacaggaacacctttaatgaagaaagaaaaaagcacgatgataaagtttgggaagctcattcataaatatacaatcgctgatggtgttcgagataaagctatcgtacccttactttatgaagggaaaatggttgagcaatcagtaaaccaaaaggcaattgaccatcgtttagagatgattacaagaaatctgaacgataagcaaaaagaagaagtaaaacaaagatggagtaaatatgaaaaattagcttcgtccgagcaacgcctttatttaattgcagaagatataaataaacactttttggaaaactacaagacacagggaagtcaatttaaagcaatgttagcaactaatagcaaaattgaagccattcgctatttagaggcttttgaagagtttgctgatttaaactgtgctgtagtaatttcaccacctgatcaacgggaaggtcatgaagtcgttgatgaagaatcgaaggataaaattcaacgattctggaaacgaatgatgaatcgttatgggacacctgaaaaatatgaggatgctattaaagatgagtttgtaaatggtgatgaacttgacatgttaatcgtcgttgacaagttgcttacaggttttgatgcccctcgtgcaacagttctttacgtagataaaccgatgaaagaacacacattacttcaagctattgctcgtgttaaccgcctttatgaaggtaaagattatggattaatcattgattatcgtggtcttttagacagactggatgaggcaatgcaaatgtattccggagcaggattggaaaacttcgatcctgaagacttaaaaggtgcgatttacgatgttataagtatcattggatctttaaggcaatactattccgatttaattcaaatatttgcaccaatcaagaacaagaatgatagagaagagtatgaggtatggttggaagatgaagagcgtagagaaggtttttacaacgttttaagtaattttggaaggaaccttggaatagctttagagtcggagaaaatctataatgctttacctgctgaagaacttcaaaagtacaagaaagatttcaagtttttccaagaccttcgtaaaagtgtaaagctaaggtattctgatacgattgaccataaagaatatgaggcgaaaatgcagaaactgatggataattacatttcagcggaggaagtaattcgaattactaatccagttgatattttaaatacgaaggcttttgaagaggaaatagaacgccttggttccaaaagggcaaaggcagatgcgattcgtactcgtttaacgaagagtgtccatgcaaaatgggatgagaacccttcctattacaaaaagttttctgaacggattcaagaagcgattcaggaatatcgggataaacggatttcagaagccgaatattttaaccgcatgaaggatattatgaaggactaccaaagtggccaatcaacggaagaataccctactgtgataaaggaaaaccgaaatgcacaagccttttacggtgttacaaaggacattttgagtgaaacaaaagaagcaacagcaagttatgatacaaatacccttggtaatcttgcatcaaaaatggatgaaatcattaaagaacaccaaaaagtcgattggcatgacaatttagagatccacaaccggattgctcaagagttagatgatcttctttttgattttaaagaaaagtacaatttggaaattgactttgacacaattgataaaatcattgagcaaatcaagacggttgctctaagacgttattaaggcaggttatagaatggaaaaacatcaaatcgagtacgcaaacagagtcattgattttgtgctgaaacgtaaaaacgtgaaaaatgtaaacttaaatgtcaaaccagatatgacaattgaggttacagcaaatgacagagtaccgattgactttatttcggattttgtaaaatctaaaggttcatggattcttaaaaatgtagggcaatttaaagaagtgcagcctataaaacaaagtgtaagagagtatgtaagtggtgagacttttcggtatttgggtaaacaataccgtttacgtgtacaggaaacaactgaagaagaaacagtgaaatactttcgaggtttcatctatctgtatgtgaaggatacagataaccttaatagaaaagctaaattaatggatgaatggtatcgtaaaaaagcccatttaacatttaatgaatcactagagaagatgtatcctctggtacaaaagtatggggttgaaaagcctaatgtcgatgtgaggttgatgaaggcacgatgggggtctgccctgacggataaaaagatgatacttctaaatgctgagcttattaaggctccaaaatactgtatcgactatgtggttcttcatgaactcattcattttaaatataacgatcctagtgaaaagttttatcaaatgctttattctttgatgccagattgggagaaaagaaaagccatactagatgaagaaatagtgaaggaattataaatcgaactactcggtaaaacaacaagattaatacatcagaaggcagttctatagcaaaatgggactgccttttttatataaaaaattaacaatagaagggatctgatttatatgtcaaaaaaaagagtgtttattagttttgcgattgaggataagagtttaagagactttttggtaggacaagcaagaaatgaaaactctccatttgagtttgttgatatgtccgttaaaaagccttgggattctgcgtggaaaactaactgtaggacaaggattaagggttgtgatggagtattagccattgttaccaaaaacacgaagaaagccgatggacagttatgggaagtgaaatgtgcaaaagaagaaggaatcccacttaggggagtatggggatacagggatgaaaaacctacaagtataccgaacgaacttgaaggtgtaagaatagttaattggacatgggataacattgcaaattggattaaatcattgtaaaaggaaaggagagctctaagatgagaaaggcattagttgttggtattgatgattatccttctgcaccacttcatggatgtataaatgatgctacatcatttgctagtatcatagagaataacggtgacggttccccaaattttgacgttagattgtatacagatgttcctactaagtcaaatctaaaggaaatgatccatgaactttttcaaggtgaaagtgatacagcattactttacttttcaggacatggttatatagatgatgtaggtggatatattgtaacacctgatatgcaaccacatgatgttggtgtttcaatggatgaaatacttactatagcaaataactcaagagcaaaggataaaatcataatattggattgttgtcattcaggggcactaggtactccaagagtaagtggagctaatgctacccaaattgctgagggtgttactattttaactgcaagtagagattatgagtactctcttgaggtaaatgggcagggcgtttttacaacgttattattggatgctttaaaaggtggggctgccgatttaagagggcatatcacacctggaagtatttatgcttatattgatcaggctttgggtccgtgggatcaaagaccggtatttaaaactaacatttcaagatttacatcattacgaacagtgattccacaagttccggtaacaacaattagaaacttagtaaaatattttccgagtccagaagaagagtatagattagatccttcttttgaagataccaattctcccaatatagagcataaagtaattgagccatatgcaaatgaagagaatgtatctatttttaaagaactacaaaaactcgaaggagtaggcttagtagttccggttgatgaagaacatatgtactttgctgcaattaattcaaaatcttgtaaacttacagctttaggctatcattactggaggcttgtaaaggatagaagaatttaattaactaatgaatatatatggggattggaagtgaatatgttgaaaaggatttttatctcttattcatgggaaagtgaagaacataaaaagctagtgaacgatcttggtgaaaaacttgaaaatgatggattagaggttactattgaccagtgggatgtacgacctggtgatgaattagctttatacatggagagggctattaaagaatctgactatgtattgattatatgctctgaggggtacaaaacaaaagctgataaccgaattggtggaagtggatatgaggcaaaaattataacatcaaacatattagcaaatcaacatattaaaaaattcattccaatttacgttggtggggaatgggataaagtcgctccagaatttattaaggggaatatgtatgtggacttaagccaaccaataggaagtgcatcgtttgagcagaattacacagatctattaacgacggtatgcaatgtaacaataagaaaaaagcaaaatgttgatactagacttcaacttgccaaaagaatgggagtcaaagctgaagaaatagtatttgaagaagaaagtaaagatgtaaagatagaaggtataattaccgatgaggtaactatcccaaggaatgatggaactccaggatctgcattatatagtgttcctttcaaattgaataggattccagactatacttggtcgaaaatttttgtacaatgttggaatagacctccacgatttactttgatgcaccgcccaggaattgcaagagttgtatcaaataaaatagttttagacggaactacgattgaagaggtaaagaactatcatagggatacgttaattttggctgtgaaagaggctaataagaaatataatgagtatatgctcatgaaagaacgagaggaaactaatagaatccaaaaagaacaacaacactattcaaacgtaatcaaacatgctaacgagattgaatttgactaaggggtgattaaatggctgttccgggctatcaagagtttatgtatccatttctacaaatgttgaaagatgggaaagaacatcgattacaggatctctatattgaattagcagaacactttaatttaactgaagaagaagtttcccagacattaccaagtggtaagcaaaccttattacataatagagttggttgggcaagaacttatttgagtaaggcggggctaattaaagttataagaagagcggttttttgtattactgaagaaggaatgaatgtaataaataatccaaatgttactcgtattgataagaaatttttaactcgttacccgagctttaataaattcattaataagaataatgaatcaacatttgacaatgaaaaacctagtaatgaacaacaaactcccttagaaatcattgatgaaaactataatatccttaaaaaggaacttcaggatgctattttggagaagatattagaatgctcaccagcattttttgaacgtttaattgtccaattattagtttcgatggggtatggcggttctgtaaaggatgctggtcaggctattggacgaaccggagacgagggtatagatggtattattaaagaggatgtcttaggattagagatgatttatttacaagctaaaaggtggaaaaaagattctacagttggaagaccagagattcaaacatttgttggtagtcttgtaggaaaacaggcgtcaaaaggcatcttcatcacaactgcagcattttccaagaccgcatatgattatgctaattcaatagacaaacgggtaatattgattgatggtcaacaattaactgatttaatgtttaaatacgatgttggagttacaaatgaagaaatttttgtaaccaaaagattagataatgatttttttgaggaataaagaagccttagtcatatttacttattgtcgataaaggaacaatttcttagacaaattaaagcaggtaaatttaattttttctgctatagggtctgcaaattggggggcagaccccagttcttctggtacaaaaatatggggttgagaatcctgctgtcgatgtaaggttgatgaaggcacgatgggggtctgccctgacggataaaaagatgatacttctaaatgctgagcttattaaggctccaaaatactgtatcgactatgtggttcttcatgaactcattcatttcaaatataacgatcatagtgaaaagttttatcagatgttatattcattgatgccggattgggaaaaaagaaaagcgatactggatgaagaaatagtgaaggatttgtgaattcaaaaatgaattaactaatcagaaggcggcttccaacttaaagtagaatctgcctttctgattatgaataataaacttccttcattcaatgattacaaatctagtaaattatgttatattaattaagttaagattttcaattctcacattatattaggtctttataagttagtagagtgtattggagtctatcatttatttagtagattagaaatctttaaatgcaagaaggtgaaaatatgcccctcataaagagaatggtagccttaatcgaaagaatggcaaatagattagatcaatccgattctgacaaaactgtaaaattgttagattggacaattcgaaaatttagaatacaagtgaatgcacatcgacataataataaagttatttacagaggggaagtctattggtgtaacttaggtgagaatatagggaatgaagagagtaaaaaaagaccagtcgtaatcattcaaaatcaaaaaggaaatgataattcaccaactacaattgtagcacctattaccaacgcaacaataaatcttccgatagctgtaccaataaatagaactcaaaatccaaatgtcactggaacaattgatttagggcagataaaagtggttcataaggcaaggttaattggaaatagtattgataaattaaggaactctgagcttaagaaagtagatatggcgttaatgaaatcagtaggtacttacacccatttaattcgagaaaagcgaaagttcgaacaaaaggaaagatacgcacaaaatttgaatcaagttctgagtgaaatcaagcaagaacttggaatcacaaaattaaagcaattcagacattaaaaagtaaataagtattgaccttttccctaggttatgttttaataaagatacagatagagcttatccttgttaggataagaggaaaaggtttatattcagagcaaagaggagatttttatcttctctttttacttactttggttattttttaagatattagatcataatatttaacagatggtgcttggtggtgtatcaccaagaggagaatgtccatcatcagatatagggagccttttttaaggctctctttttatgtgtgtatatttattatagttaaatatacaccttcaagttatttacgttggatcattttcaatcataatatcaggtaaattccactactcttgttattaataatctacagacagcacactacacatgtggagtgtgtggctgtactcgtcaaaaaagataaataaaaatctaaaaacataagcctctccaacccaggagaggcttataatgttatatgaaggttccatttcttgcataaagtcctactgaataaaagaggtgtatcaaaatagaacagaaaatctcgaatcaactaacgattagtgaacaaatgaagcgcgttttatcaacatatcaacaagcaaaaaatgaggagtttaaggggcaccctttgttagatcttatttgtcgtgaaataaaggatactctttttaaagttgttgacttagatcctaatatatatcatgtagcaggttcggttggaaaaggccgttgggctgagattccttggatttcaatttttctaaagaacttaacgacttcggcgacaagaggctactatattgtttacttatttagtgcagatggaagcggtgtttatgtaagtttgaatcaaggatggacatactttaaagaaaagtatggtacaaagataggtagggcgaaaatccaaaaaacagcttctattattagagaaaaactaaataccatccctcaaaatatgaacctttcaaatatcgatttaaagggtaaaggtgatcttgcgaggggctatgagttaggacatgtatgtggttgtttttatggtgtaagcaattttccgagttcagaagacattataaacgatttacaagctctattagttacatacaaagaagtagaaggtcttatcggaaatcgatcgatagaacagtttaatgattttattctgttgcaggaagatggccaatttttagaagaccgggttaacgaagaggagtatcagatagcggctcaaaccttcatcatatccgagaattcgaatatcggatatgaaatcaatcaaaagagagaacgtccgcaacctatcattaatcaaggtggtcaaaggcaatggacaagaaatgcaagtcttgcctcaaaagctatggtgctttcgaactacaattgtgaaattgatcattcacacaaaacttttatctctaaatctaccaacaagccttatgttgaatgtcatcatcttgtccctatcgctaagcaagtgaagttcaaatatgacttagatcaactggcaaacttggtaagcctatgtccacactgtcatcgtcttattcattatggtcaagatgaggagaaggaaaaactgctgaaaaaattgtatgatcagcggaagggtcacttgaaaaagataggaattgaaattaccttttcagaacttaaacgaatatatgaaatgtcgaatatttagattcagattaaaagccttggtcaagtgaatacaaagcgccgcgcacagaaacggaacagctgttggcagacatttggcaggatgttctcggcatagaccgaatcggagtcacggacaatttcttcgcgctcggcggggactcgatcaaaggaattcaaatggcaagccggcttcagcagcacgggtggaagctggagatgaaggacttgtttcagcacccgacgatcggggagctcagttcttatgttcaagccgctgacgctaaaccgatcgatcaaggccctgtcgaaggcgaagtcacactgacgccgatccagcgctggttcttcgaacggaaatttacgaacgagcatcactggaatcagtcggtcatgcttcacgccccttcagggtttgacccggagctcgtcgaacagacattggcggcattgacagagcatcatgatgcacttcgcatggtgtatcaaaagaataacggccgcctcattcaatataaccgcgggccggatgaccgttcgttcgcctttcgagtggttgacctgcgatatgtcaccgacattgaaacggaaatagccgctcaagcaaaccgccttcaggcaagccttgatcttgaaaacgggccgcttgtaaaggctgaacagtatcagactgcggaaggcgaccatttgctgatcgtcattcaccatttggtgatcgacggcgtgtcatggcggattctgctggaagactttgcatcaggctattcgcaggccgcacagcagcatgatgttgttttccctgataaaaccaattcgtttaaagactgggccgaagcgcttgaggcttatgcgcaaaccgaacgcttccttaaaacggccgattattggcgcagacttgaacaagagcgtatttgtgagctgccgaaagatcgtgctgccgcagaaagaaaagcggaaaacacctctgctgttaagtttgaattaagcgaagcggagactcgtctgctgctgacgaaagtgcatgagccgtatggaacggatatcaacgatatcctgctttccgctctcagcctgacgatcagggaatggacgaacggctccaatatttgcatcaatatggaaggccacggcagggaggaaatcattccagggatgaacatttcgagaacgacggggtggtttaccgcacaatatccagttgttttaaaaagccaagcagcggcagggttgcctgagaccattaaaaacgtcaaagaaaccctccggcgcattcctgacaaaggaatcggctacggcatccttcgctacttaacagaccggaaaaaagccggtgcaattttctcgatcaagcctgacatcagctttaactacctgggacagatcgacagggaggtgcagaccggcttctttgggccttctccttatgatatgggaagacaggtctctgaaaggtctgaagcactctatgcactgagcttcagcggcatcatcagcaaggaaaaattcatcttgtcatgttcattcaatacagaggaatatgacaggcagaccatacaggagctcatggacagattcaaagctttcctgacagcattgatcgaccattgtacagctaaagaagaacgcgaatttacaccgagtgatttttctgccggcgatcttgagatggaagaaatgggcgacctgtttgacgttcttgaagaaaacttgaaataaccaccgaggacttgcccgcttgtcaagcgggcgagcctatgaaagggggatacgatcttgagccagtttaaaaaagaacatgtccaagacatatactatttgtcaccgatgcaggaagggatgctgtttcatacgctgctgcatccggggcaaggcttttatattgaacaaatcagcatgcaggtgaaaggctcttttcaaaaggatgtattggaaaaaagcatgaatgtcatcatcggcaggtatgatatattccgaaccgttttcgttcatgaaaaaatgaaacgtccggttcaagtcgttttaaaggaaaggtcatttcaggcagaagaaattgatctatcaggactttctgaagcagaacaaaatgagagaattgaagattataaacgaaaagataaagaaaaaggatttaacctctcaaaagacattccgatgagaacggcggtttttaagaaggggcaggatcgttacgaatgggtgtggagctatcatcatattctgcttgacggatggtgcttcggcattgtcgtacaggagctgttcgaagtatacaacgcgctccgtgaaaacaggccatacagcctcgggcctgtcagaccttacaaagaatatattaaatggctcgaaagccaggacaaacaaaaatcgctggtctactgggaacatcatttagccggattcgaagggcagacgacattcagcgaacagcggaaaaacccggagcaagccggcaatcagccggaagaactgctgtttacacttccaaaagaagatacagaagcgttcacacagctagcaaaagcgcatcataccacgttgagcacggcgcttcaggcggtgtggtcggtgctgctcagccgctatcagcgatcccgcgatctgatcttcggtacagttgtttcaggccgccccgctgacattcaaggtgtcgagcacatggtcggtttgtttatcaatgtcgtcccgaaacgggcgacctttggcccgcaaacgacctttacggagctggtcgctgatttgcagaagcaggcgctcgaagctgaaccgcatcaatatgtgccgctctatgaaattcaaagtcatatagcagcgccgaacttaatcgaccatattatcgtttttgaaaattacccgctgcaagaagccaataaacagcagaaagaaaaaaatctcggcttcacaatggacgagatcagcgtttttgaaaaatcgaattatgatctgaatttgcttgcttcaccgggtgaagaaatgatgctgaaacttgcatacaaccggaatatattcgaaccatctttcatcttgcggttaaaagaacagcttttgacagccattcgcgaggtcatcagagatccggagcagccgcttgacgacatttgtgtcgtttccaaaaaggaaaaagagcgacttctccatgaatttaacggtcaagtccaacggaagcaaatcggcctgacgattccccaatggtttgagcaatacgctgaagcgctcccggaaaagcccgcggtatcagcggccgggcggacgctgacatatcgggaattgaacgaaaaggcgaacaaggtcgcgcaccttttgcgcaaaaagaacgtcggccgcggcgagcccgtcgcccttttgttccgccgttcgccggaaatggtcatcgcgatactcgccgtcttaaaagcagggggcgcctatctgccgattgacccggaatatcctgaagcacggattcagtatatgctggaagacagcggggctgtttgcatgctgacacaggaagagcttgccggccgggcggcgtcgctttcttttcataagcatacgatcctgatcgacgatcctgctgtgtctgcagaaagcgggagaaacctcgaaatcgccgccgagccggacgaccttgcttatattatgtatacgtctggcacaacgggaaaaccgaaaggcaatctgacgacacatgccaatattacaagggttgtaaaagagacaaactacatcagcctttccgagaaagacaccttgctgtccctttcaaactatgcgtttgacggcttcacatttgatctgtacggcgcgctgttaaacggagcaaagctggtggtggccgatcaggcgacgattctccatatcggcaagctgacagaagcgattcagaaggaaaacatcacagtcatgtttgtgacaacggcgctgttcaacttgctggttgatgcgggaacagggtggatgaaagggattcgcaaagtcctgttcggcggagagcgctcatctgtcagccatgtcaagaaagcatttgctgccatgggaccggacaggatcatccatgtatacgggccgacggaaacgaccgtcttcgcgacgttctatccggtcaaccgtatggaagacagcgcggtttccattccgatcggcaagccgataaacgaaacgaatgcatacatcctgacggaaaataaccggcttcagccgattggagcggtgggtgaattgtgtctgagcggtacaggagtatcgcgcggctatttgaacaggccggaactgactgcggaaaaattcgcgccgcatccgtttaacagcggtgaaacgatgtacaggacgggagatctggcccgctggctgccggacggcaatatcgacttcatcgggcggatcgatgatcaagtgaaaatccgcggacaccggattgagctcggtgaaatcgaagagcagctgatgcgctgccaaggcgtaaaggaagccgttgtaaccgccaggaaaagcgggaacggggatgcggcgctcaccgcttatgtcgtcccggtgcagggaactgaggttgcaaacgaggaggttcgccgccaattggcgcggaggctaccggcttacatggtgccggctgcgtatatcatgcttgaagagctgccgcttaccgctaacggaaaagtcaaccgacgccttctccctgaagccgatggccggccgaattcaacagagcgccgtgcaccccgcaatgctacggaagaaaagcttgcagtgatttggtctgaggttctcggcagacagcagatcggaatagacgagaacttttttgaaatcgggggacattcattgaaagccatggccgtcgcctcccggatgctgaaagatctcgcaatcgatgttccggtgaatgtgttgtttgaaatgcccacaatcgagggcctcgcggcttatatcgaccaaggcggccatgtggatgaagtgaaaaaaaccgtcttcaatcaggcaagcacccgccatttgttcgctttcccgcctgtcctcggatacggcatcatgtacggcaagctggccgaacaaatgccggaatacaggattcacgcgttcgactttatagaaagcgatgaccgcgctgtgcgctatgcagaagccatctccgaccttcagcctgaagggccgctgacattgatcggctattcagccggctgcggacttgcctttgaagtggcgcaagcgctcgaaaagaacggacggaaggtcgaaaagctgctgatgatcgactcatatatgaagaacgatgtcagcgatttagaagggcggtcaattgaagccgatacggccgccttgatggaagccaacaaggacaatgaatatatgaaaatcaagacggttgccgatggcatcgctaaaaagatgacagcctattattcttactttgtcaatcttgtccatcaaggaacggtcagctcggagattcatttgatcaaatcagagcacgcaaaaccgctcccggcatggctttcgttgtggaaagaaggaacggagtcttcatatgatgaatatcaaggcgctggaagacatgatgaaatgcttgcggacggctttgttaaaagcaacgcagatctcatcagacagattttgggcgaacgtgccgctgtaatcggaggtgcatgatgcatgaacgagatcattaagcagtttggagcgccggcaagcggtatgcagttgatctgtttcccgtttgccgggggatattcggcatcattcagaccgcttcacgaacatttaaaaacagattttgatatgctggcgatcgaaccgcctggacacggcacaaatcgaatggcgcttgtcgacaatttggaaaagctcgccgatttgtatatagcggcgcttaagccgcggctttcctctcaattcgtgctgttcggccacagtatgggcggcatggttgtttacaggctggcgcaaaagcttgaacaagaagggatctttccggcagccgctgtgatatcagcgatacagccgccccatattcagcggcaaaaggtgtctcaccaaaaggatgacgcatttctcgaccatctcattcagcttggcggaatacccaaagaactggcagagcacagggaaatgatgaactttttcctgccttcgttcagagcggactacagagcgcttgagacgttctgccataccgatcatacgccgcttagatcgcctgtgcatattctgaacggagaccgcgatgagaaatgcatgagggatgcgcttggctggaaaaagtgggcgaatacgatcgatttccactatttcaaaggcggacatatgtatcttttatcagaaacggaacaagtagccgccaagttgaaaacgattgccgcggccagccgcagtacggctgttccgacaatgtaaagaaagcggaaaatcggtgtgctgcagctgccgattttccgttttttcagctttttttcagccgattttcccgccgaaccatcgtcgccccaataattccggcaatgatcatccccgttccggcgaagtgaaaccattcgagtgattctcccagccatataatccccgccaaaatcgtcaccagtgtcgccaagtgattaaacatgctgattttcgcagcttctatttttgacagtgcataatttgataaaaatgatgtcgcaaacgatgacaacacgcctaaatacaataccgaaagaacaaacaccggatcagtgaagggggcaaaaaatccgctcagcgtgccgtctgacatatggctgattccggcgatgccgttgaaaaaaagaaatcccgctcccgttgtgacatatgttaattcaagcgagctgaaggttcgcgtcatctttctggcgagcacgctgtagcccgccgatgaaagcgccgaaagcaaaatcagcgccgcccctcttaaatcggaacttccggtgcctgcacttttcatcataaagatgcaggccacccccgccgctgacaagacggtaaaaaagaattgccgtttcgtaaaccgctcatttaaaaaataagcggcgaatatcatggtgaaaatcgggatcgccgcttgaatgattccggcttcagacgaagacgtgtagacgagcccgaaaacttgaaaagcaaaaaacatgacagggtaaaataatgctaaaggcagcactttcagtgcgtcttttatgctgatggcgatcttcacccatccgagcagaaggggaataagcgcagccaaaaaagcgaccgtaaagcgatgggccagaatgtcgaccggactcgctgcagtgagagccaatttgacaaagaaaaaggaaaatccaatgataaaagcatagagcaaagctgccgcataagcagatttgttcaaagtcgatcatctccgttaaagtatgcatgcaatacagatattttaccggcttctgtcatcttatacggaagcgaaatctgatacaatacaaaaaaacggaatctgtaccgttacagattggcgaaggagacgaacatgcacaaatatgtcgcactgatgaacgaattggaggatatgatcgaagacaaatcctttcaggaaggggacaggctgccttccatccgcgcgctggccatacgtttcaaggtaagcaaaagcacggtcatcagggcgttgaacgagctggaaagacggcacctcatctattcagtgccgaaaagcggctattacgtcgtgaaaaaaacgaatcagcggcccaactccggaaaggctgtaatcgatttcgcagcatccgctcctgatccggatgtttttccatacatcgattttcagcattgcatcaataaagccatcgatacatacaaaaacgatctgtttatttatgggacgccgaaaggtctgccgtcgttaatccaagccgttcagaaagagctcgcaaacagccaggtgtttgcaaaagaggaacacatatttattacatcaggcgtccagcaggccctcgccttgctcgcttcaatgccttttccaaaccggaagcggaaagttctgatcgaacagccgagctatcatttattgattaaataccttgaagttcacggcatccccgcggtcggcatcgagagaaccgccgaaggcatcgatatggacgagctggagcgcatctttcaaaccgaagatatcaaatttttttatacgatgccgagattccacaatccgctcgggacatcctacacggaacgggaaaaaacggccatcgtcaagctggcggagaaatatgacgtctatattgccgaggatgattttttaggagatttggagaatgataaaaaggcggatccgttacattactatgacatttcttcccacgttatttatttgaaaagtttctcaaagattatttttccgggtctgcgggtcggagccgccgtgctgcccgattctctgacaattgtgttcaaccggtacaaacagctgctcgacattgacagttccatgctgtctcaggccgctttggagatctatttgaagagcgggatgtttgaaaagcataagcaaaagatccgttcttcctatcaaaaaagatcatgccttctgcatgatctgctaaaagaatgttccgcgtctctaggggatgtgtttgaatttcatcctcccgcacagccggctatccacacccatattgaattggaccggacgatcccggcatcccgtctgattaaaagcctacaaaaacgggacgtcctgctcgaaccggtcaacgctcattatatgccggcttttccaaaaagaaatctattgaaaatcaatacgtccaatgtgaaggaagaggacatccgcagcggcatcgagcggttgcggcaagcggtggaaaccgcttatttttagggcgggactttttaaagcattgacagttcagcgcagcttttcatcacaatccggccgggaaattcaggtgcggcggaacacaccgccattttatagccggggtcaatttcataggcttgtatatagcaaggcggatagccggggggagtttccaccgaagctcgcccctgttcgttcagtttgacggagaaggaatcaagcggcagagacaggccttttcccgcctgtttaataaagctttctttcatcgtccacaaatgatagaaatacgacaggcgttctgattcgtccttttccatgagatcatcgtgctcggaaggtgaaaaaaaccgtttggcaatgtcgaaattgatcggcttgatcttttcgacatccactccgatcggctgcgcgccggctccgcacacgatccattttccggagtgggaaatgttgaaatgaaagtcgttcagaccttcagcagccggtttgccgtaccttccttctgtaaaacggatctgctcattcggcaaatgaaacgtttcgctgatgatgtgcctcgccagcacttctccgatcagcgtccggctggcatcttcgggatatctgtatctgcccactttttttcgcttttcttcagacaccatggccatcattcggttaaattgaccggcttccggcagctgatccatataaacggcgtaaatcttcatcaaacgcaacctcttcacatgatatttttctgctttcattttagcaaacagacagcaggaaagataggcatgatacttgtgcagaatggagtaatgaacatgatagacggaacattgataaaagatacatgcttcgggagggagcttttgatctatcttcctccttcatacgggagcggtgaaaaccgctatcccgttctatacgtccatgacctgggagatttattcgatccggcatacagcaacagtctgcgctcaatcgaaaagctgttttcgagtcaggaagtgccggaattgctgctggtcggagtggctccaaaagacagggaaagcgaatacacgccttttcccaagcggcatttgctgccgaataaacgggagtacggcgggaagggcaacgaatatgccgcttttttggccaatcggctcaagcctcatatcgaccggcactaccgaacaaatccgagccgtgaacaaacaggaatcatcggaaagtcgttcggagggttgatctcggtttacacagcttttctagcatcggagacctttggaaaaatcggatctttgtcaggttctttctggtttgaaggaataaccgagtttatgaagaataaccgctttgagaataagcatctgcgcatttatatggatgtcggaagcacggaagggacagacagggataatctgcagaaagagatgataccgaggacaaaggaagccttcagcctgttaacagaaagcgccgcctccgaaaaagaactgaaatttgtcattgatgaaggtggctcacatcggcttgagcggtttgcgaagcgttttccggaagccgttaaatggctgtttggctcctgtcacaacagcgcacggaatggcaggagtttctgattggcatgaagtatcgttgtaaacgagaggcgcggaagcaatggacattctgaatcgtttggctgaaaaacatcgattatattgaaaagcactggatcagccgctgaaacacgaagacatcgccaaaatcgcatattgttcgaaatttcattatcagcggatgatctacatgctgacgggtgtcacctttgccgattacattcggaaaagaaggctgacagccgccgcgcaggagctgactgcaagtggttgatgctgcttttaaatacggctacagcacaccggaatcattatcgggaggccttcagccgccttcacggcatcagcccttcacaggcccgagaaaaaggcggacgctcagggcatttccacgtctatcctttcatattcaaataaagggagtggaggatatggattacaagattgttgaaaaagaaccgtttcaggtgatcggcaaagcgttggaggttacggtcaaggatggtcaaaacaaaaaggatattccggctttttggaacgaattaaatcacaacggctttaccgattctttaaaaccgcacatcggcccgcttggcttccttggcgtctgcatggattttaacgatcaacccgatacgttcaatttttgaaaaaaataccgcttacacgcctgccggctgtgtcgaaaaaacgattcccgccgcaacttgggccgtctttgaggccatcggccccgtcaatccggctggtcaagccacatgggaaaggatcttctcagaatgttttccggcgactggctatgaactggcgaacgagccgcaatttgaagcctatcctgaggacggggatattatggcgcaagatcatatcaccgaaatttggataccggtggtaagcagaaataatcctgaactagaaaaacggatgaaacgctcatccgttttttttcagcgacatatgtacaggcttggcagctctgatgcgccttcctgccattgctgcttttaaaagctgtttggactgcggcaaagaaaaccgcaaaatcaggccggttaaaatggcggttaaaacagtaccgatgccgatcggcccgccgagcagccagccgatcaataaaatcgtcagctccattccgtttcggacccactgaacgttccagcccgttttctcggaaatcaaaagcatcagggagtcacgcggacccgcaccgagatcggccgatacataaatgccgactccgtaaccgataaaaataacgccgatcacgaatacgacagtgcttgaaatatacgtttccgggtctggaagaatataagtaaagaaatctataaaaataccgattaacagcatattgagcacggcgccgattttcggccatgcttttgtaaataaggacgttaaacctacgatgaccgccccgacaataatcgcccattggccgaccgtaaggcccaaaagcatatacagcccgtagtgaaacgcatcccaaggaccgatgccgagcactttcccttcaatcgtaagagaaaccccgaaagacaaaacaatcaatccgacaaaataaaaaagccagcgcaaaacaagttcccgcttcaatggattcccctcttttcaaaaaaacaatcaattgtcattgtatcatattcttcagtggggtgatatccaaaaaatgttttattttgtgtaatacttgtaccaaactttattaaaataacaattgactaaaagatatttccattttataaaattaatgtataatatttactagtaggtgatctttatagggatagttgcttaaaaggtatatagactttaatggatttgggatcattctaaaaaaggagagtaaacatgaagaaactttatattagtgctgtcctgggtttattgtttgtttttgttggtggaacaaaaatacatgctcaagaaccacagaacaataacggggttttggatgagaataaattcattgatgaaacagtgtattcatatacgcagccaattagcatacaggatggtgaagtaacaacacaagcgaaaaaatatatcaaaaccgtgtcagttaataggagctataaaagtcttttaaacattgtagttgccagacattactctgatactactttcacttacggaagcggtaagttatataagagtcccagagctttaagtaatgattggtggacacttcctccgaattttaaatcaggaagctctaaaagctgggactggtacaatacagggaaaggtgcaacaggacgttctaatttacaagtaagatacacttggggagttccaacaccatgggggccagttggatctaattatagctcaagaataaaggtttcatttaaatcaaatggcagttggtatacaaattaaagctatatatgaaaggtgacataccgatgggtacaatagggataaactttaaaaacattcaacatcaatatcgtaccaaggatgtgctaaggggggtgagtttccatgccgatccctcctccatcacgttcttggcaggcgagaatggagccggaaagacaactttgataaaggttgctctcggcttaatcagtccgaaggcaggaaatgcgctgttcgacgggcaaagcgtcggggaaatccgggagaagatcagctgcgtgtttgatgagcctcctgtttatcctaatgaaagtggtcttgacaatctaaagtttttatcaggtatacacagccttgatcgaaagtggagtcaggaggtttgtgccatgctcaaattggatgagggacttttaaaacaaaaagcaaaagcgctatcactgggtcaaagacaccgtttagctgtagcggccgcgttattgcgcaaacctaaatatttgtttcttgatgagccgtcaatcggcctcgacccaccgtcatggcagctggtccaaatcgctttaaaacagatgactgccaggggatgtgcaattttgattacggggcaaaattatgacgcgattgaaaatctcgctgacaatatagcgattttgcaaagtggaaaaattatcttctccggtcctattgtaaaacttgttcaagcatttcccgtatatgttcgaattgtaactgatgaccatcgggaaatagctgtgcagtttccagaagctgaacctgattcttccggaatataccgcatcgtttgcgaatcaggtgaacaggcccgcgccgtgattgatcaggtgaggagaagcaccctgaattttcaagagctatcgactgaaaaagcgtcaatggggaaaatggtgacagatatttacaaggatggatttcagtcggaaaagagagggttaacgtatgaatccgttcaaaattgaaacgaatcaattgaagaatagcatgcttgtgagggtttgtatcgcgttattattttgttgctttatctgggggcttctcactttatatcaaagcgctgaaggcgaggaacgcagacaggaaaagattcaccaatccgtcattgatgaagtgaaaaagaatggggcggaggaagagcttgaaaacggcggattggagattgaaaaaaatgatgatatagcgcgtagtatgtacataggacttcatccaagtgttactcctaatctgtttttattaatcctcgcgaacattgggccaattgtttttattataatcggatctcaccttgtcggaagcgaataccatcaggggactgtgaaaatgaaagccgctcacatcggatggagaaaagcggtttctggaaaactatgcgcactgttaagtctggttattgttatggttattgcagctttattgcttggactggcaggcggttggctggcttggacgttcgccacggcacattcagacttagccgcttctcttgaagtgaatgcagctgtctcctatccggtattaattttgtttttaatgatcggattgacattttacagtgttctaggaatgactgtcacgctgttgacgaaaagccggctggcgggtgtgctgatcagcttggcgatcccgtatgctgagcaaatgatgagtctgccttttttgccattgactgcttatcaatccctcatggttcaccattttatttatgtcgacggaagcatcataggccagccctatttgacagagccgatgggcgaaccgggcgcttgggctgttcttgtatgctggctctttgttgtcattgcggttcagcagtttgcagcgaaaaaacagcagattttatgaaaaaaggggggaatggcgttgatttttttagttaggctgatctgtcttgcctttttagcctgtctggcgctgttgttttatgcaccttttctggcgatgcccgtttggatcgctttgatcattgccttaatcgtctgtctgtatcttgcctttatagaggaaatgaaggaatggagaagacgaaagcactaatcctttcttcagcgttttttcttgtataaaagaacgtttgctaaaacgaaatagatgacggccgtcccggacacaaacaaaaaaattctttccactctaatgccgtcatgtatgcgaagcggaggagttcgagatgttcatccaagtaataagcctgggtatatgcgccgactgtcatgccgataaaggcgaatagaccgaccacattgagcaccattctcatactgaatgtctttttctctttttctctttttcgtggttcattttaaagaaatcctttccaatatgaatttatcattctattgtacgaatacaacgcttggatgattcaaaaacttcttaatctattgttaagaagtttttttattttggagaaaatgtaaaagataaaacaatttcatgaactttttgagcgaaggcctaaaaatataggaatattataccgatatggtaagtgaaatctttttctgaaatataaaagacaaggcaggagagaaaatcatgcagcaacgcaatacaccggatgtacagagatggtttccgagcgaggacggaaatgaagcaaaacgaaacgagttcctatcattgatcgagcagctgatcgagggagtggacaacctgaaaaatccggatcaggtcaaccttggcggcgagaagaaccgagagggcttcttttatgaaaagctggttgcagagagtcggattccgcatgaaggtgcgccgatgaaagaggttaacgaagagctgttgaagctgttgcacggccatccgtatcacaccaaatactttttcacgaacattctgccgatggccagcatcccggggatattaggcatgcttacggcgtttatggtcaatggcaataacctgtgggatgtgtacggtccagccggagcggaggcggaagtgaaggttacagcgatgatgtcaaagcttgctgggtatgatgccgaaacaagcggaggatatacaacgtggggaggacaaggggcggtatacagcggcctcagaatcgcgattgccaaaatggctccgtcatccctaaaagaaggggttcccggcaatttctatgcgttttgttctgaagcggctcattacagcttgtataagtcgatggaagccgcaggactcggcagcgatcatttaattaaagtcaaaacaaatctcgaccattccatggatacggaagatttgcgagagaagcttagacaagtatgcgaagccgggggcattcccgtctatatcgtagccacgacgggaacgacagatgcgatcggcatcgatgatgtgagcgctgtccgccgtgcggctgaagaaaccgcgaagagcttcgggctgccggttccgcatatccacgccgattccgccctgggaggattttttgccttttttaatgagtacgatctgaatgagaacgctttatccttcagtcccggtgtcctcagcatgatcaaaccgattcaggaaaaaatgaggcatctgcatgctgccgattcgctttgctttgattttcagaagctcgggcagacgccttatgtgacgagcctgtttcttgtgaaggatcgcaatgacttaaaacggatcgatctggatcccgatgagacgccgtatgtcggccaccgcggctatggggactaccatacgggctacacgctggaatgttcgcgcatggccagttcgatcagtatgtacagcgcattgatggcatttggctatgaaggctatcaaaagctgcttgcccagttccttgaagtcaacctgcattttagggaacagctgtctcggcagattccggaggccgatattgtgaacccggacaactgcggcatgtctacgctgtttcgcatttatcctgaaggggcgcctagatttgaagacgaaatttcgggagcatgcaccattgaagagctggaaagaaacaatgcgcttactgaaaaattatttgaaaagctcggaacaaaaagggacaagatgttttttggcgatacgaaaaaacacttgcttgtgaagtcctgtgaaggggttgaattaccgctttgcgtcagcaagtttttcgtcatttctccgtataccatgcctgaacatgtcccgggaattatcgattatttaaaagaaactattgaggaagtcttccgggagcatgggtctctcatgacaaattaaaggggatatagacgatgaaaacgttgaagaaaaagctaacagaacacatttcagtcaaaattatgattggcgtcgccttagtgcttttaatcacgatcgcatcattttcagccgtgtttacttttatcagcaaagacttgtcagagcagctgaaacagcagttccaaaaccgcctttataccgatattcatcttgctgaaaatcaaatcaaacgtctggacgggaatccgcttgagatcgattccgcagacggtccgctttacaagcagacaaaaatggctgtggacagcctgaaaaagaaaaacaaacttgagaatatttatatcctttccaatgaaggcgggaaggagcggattctcgtgctgtcggatacgcccgatgatttcggcacggattacagcttttctcctgaaatgaaagaagccttgacgacaaacaaagagacggtaagcgacgtgtatgaggacgaatacggcatccaccagtcgatttttctgccgcttgagaacggctcaggagaaaaggtgggaattttggggatcgaccttgatgcttccgtgattccggagacagcggcaaaagcgaaatggtatacaattgcgatctcagcatttgtcttgctgctcggaatggtcatggcctattttctcggttcttacatcgcgaagccgatcaggcagctgatgaaggcttcagaaaaaattgccgacggcgatctatcggccgacatttctgtcaagagccgggacgaagcaggaaagcttgccgaatcgttcaagcggatgagcgaaaatttacaacaattgattggacatatttcagcttcctctgaagaggtatccaagacgagcctgcagctgaaaaatgtatcggctgaatcgagcgaaagcgcagctcaagtggctgaatcgatgaacagcatgagcgagggaatcaacgaggttgtctcttcagtttcggattgtcatacatcggctgccgaaatcgatcagcagcttacacatgtcacagaaaaagtgaacgagatgaagaacgttgccgagggcgtcagcaaggattccaagacggggcaggagcttgtcgaagaaacattgcggcagacccagacgattaaaaacgtgatggaagagtccaaacaagcggcatcagagatgcaaaaccatacagaagaaattgaaaaagtcatcggaatgatttcctctattgctgaacagacgaatttgctggcgctcaatgcttccattgaagccgcccgggtcggtgaggaaggccagggctttgcggttgttgccggagaagtcagaaagctttctgaacgttcggcagatgccgctttatccgtttcccagcttgtggcgggcacgcaggagagcagccggcttgtcatggaacgcattcaggaaggaaacgaagcggttgacaaagggcagattttaatcaatggcacatacgagaatttttcaggaatttttaaaggaatttctcaattcgccgaacgcacagatcaattgcttcagtccttgttaaaagtcgaaaaatcgtatcaaaccatttcgtctgcgatggagcagatttccgccgttaccgaagagcaggcggcaggctctgaagaagtcgctgcggcagcggagcagcaaagcgccggcatgcaggaaatcgcatcggccattcagcagctctccgctttgtcggaagaattgaatcaggcggcatccaagtttaaactggccgctgaataaaaagaacagcctgatctctcttgatcaggctgttttgtttatacaggattcaaaatccggtttaaaaactgttttgttcgttcttccttaggggctgagaaaatttgttcaggcgggccctgttcgacgatgacgccgccgtcgataaagacgacttcgtctgcgacatcctgcgcgaatttgatttcgtgggtgacgacaaccatcgtccagccctcatttgcaaggtctttcatgactttcagcacttcgccgaccagctcggggtccagagccgatgtgggctcgtcaaaaagcatcagctcaggcttgatggccagggcgcgggcgatcccgacgcgctgctgctgtcccccggaaagctggaatggatagagatccattttgtcttcaaggccgaccttttgcagaagctgaacggcttcctttttgacctcttctttattgcgcttttgcacttttacaggcccttccatcacattttcgagcacggtgcggtgcgggaacaggtgataggcctggaataccattcccgactttctccgcaggcggaggaggtcagcaggtttatttttcttggaaaaatcgatggtgaaatcgtcaaaagaaagaatgccgcggtttggaatttccaaagcgttcaggcagcgaagcagcgtcgttttgccggaaccggaaggccctaaaatggcgatcacttttcctttttcgatgttcagatcgattttttttaagatttcattttcgccgaaggatttattcagccctttgatcgcaagcatggtctatttccctccttacttggccacataccggtccaaacgccgttcaatctgctgctgaacaagcgcgagaacaaagcagatgatccaatagatgaatgcggcttccatataaatgattaaaatttggtcaagattgccggccccgatttcctgggccttccggaataattcagcaacaagaatctgtgacgcaagcgatgtatctttaaccaagctgatgaatgtattggataatggcggaattgacacgcgcacagcctgcggcaggatgaccctggtaagcgccgttttttgagtcattccaatcgaataagccgcctcccactgtcctttcggaacggaaaggatggaagccctgatgatttccgacgcataagcgccgacatttaatgaaaaggcaatgattgcgctcggaaacgggtcgatcgtgacttgaaacgctggaaacaagtaaaaaataatgaacagctgaacgagcagcggcgttccgcggatcgctgagacataaatgccgaaaaccgctcttaaaatgcgggatttggacattctcgccagcgccgtgatcaatgcgatgatcataccgaatataaaagagagaatggcaaggggaatcgagtaatagattccccttaaaaagatcggccaaaatgactcacgcacaagatcccacgggatcgcctggccgatggccgccgcttgtatattacttagaaacatcttcgccaaaccatttcttcgctattttcgcgagtgtgccatcctctttcatgtccttcagcgcggagttgaccttgtcaaccagttcgccgcttcctttgcggaaagcaaaatgcgtagtttgcggctcgcctgtttcaaaagcgattttcaggtttttgtttcctgacgtcttcaaatagttcagcaccgccagtttatcgttataggtgaggtcgacacggccctgctgaatcagctgaaacgcttgagccattccttctacgccttcgatttcagcgccggcgtttttcgcaaggtcattatagttgcttgtcaaagactgcgcggcttttttccctttgacatctccttcagactttacatcgttgttgtccgcttttgtgacaacgacggcttgggaagttgtatatgaatcagaaaaatcgtactgatcttcacggtcttttttcccgacttggttggcaacgacgtcaaaacgctttgagttgagtccggcaaacatgctgtcccactgcgtttctttaaattcagctttcaggttgaggcgcttggcgacttcctgcatcacttcgacatcataacctgttaatttatctgtttttttatcgtggaatgtaaaaggttcgtacgttccttcagtaccgactgtcaatacgcctttatctttgattgaagaccagaggctgtcgccggctgcgtttttatccttggaattgtcccctgacgcgccgcatgcggccatcacggtgatcaacagcgtcaataatacagcgaatattgctttcttcattttattccccactttactgattggatttagttgatatgattttacttaaggctcttacaaaagtaaagcataaaccttttttagtatgagtcaagaaatacgtttttagtgatgaaagggagagaagatcattctgattcctgatcgaagcggatcttccattttttaagcctgtattgcaggctttgcctgctgatccccagcacccgagccgcttgtgacacattgtaattgcattttttaacggttttttgaatataatacttttcggcattctcgatttgttcctttaaaggagcggccgaggcggaaggaagcggggcgaacagatcatagccctgctgcggcagctgctcttttgccgctggtttcgtcctgtattgcaatggaaggtgcgtcagctcgattttgtcttcgtaggacatcaaattcatggcgccttcaattaaatgttcaagctccctgacgtttcccggccaatcgtatgaaagcaggaaccgccgcacctcttcttcaaaacccttgacctccatttggaacaatgcgttgtatttgtcgataaaatgctgcgtgagcggcataatatcttccttccggtcttttaatggaggaataaacaaggtgacgacgctcagcctgtaatacaaatcttttcgcagcctctggccgctgacagcgtcgactggatcttcgttcatcgtcgcgatgatcctgacgtcgatcggagtatcctttgaagcgccgatccgcctgatcgttttttcttgaatcgcgcgcaaaagctttgcctgcaatctgaagtccaaagaattgatttcgtcaaggagcagtgttccgccgtcagcttgttcgaaaagacccggacgatccacggctcccgtgaatgcgcctttgaccgtgccgaataataggccttcgacaaggctttccgggagggctgcacagttttgcgagatgaatgggcccgttgagcgctggcttccgttatgtatactttgggcgaacagttcttttccggttccggtgtcgccaacgatcagaatggaggaagaggtccgggtcgcccgctttgcatgttcaatgacttccttgaacgccggactgacgccgatcaggctgtcaaacgtatactttgtgctttctgttttgttcatattttctctgatcaggcgttcaagctttgtgacatctttggcaatctcgaccgctcctttcgtattcccgttttccataatggggaatgtatgattgacggtcgtaatttcctgtcctttgttattaaagtaagtctgtttgacgtttttgttcgttttcccgtgatgcagcgcctgcaggagggtgctgtcatgctggctggcaaacgtaaacacgtccagcacgtttttgccgagcacatcgccgacatccatcccttcaatctggctcatctttttgttatagacaacagatgtgccgttttcatcgacgacatgcaagccgatatcgatttcatctataattccttgaaaaataagtttcagaaaatcataatccttcagcaattgatatccccctttgttcgtatctgtctccattttaagtgaagacttgataagggtgcaaaaaaatatgcatttatttttgcacctttgcataaaaaccgcaaaattttttgcgagttacacatgcaatgttctgaaaatttgcggtattaagagttggcacgatacttgcatataagatagtgtgaaacaaaatacgacatctggcatgtatgtccaaaaataagaaggaggaatcagaatgacggttctatcaaagtccgagaaaattatgaagcaaaccgcacattttggcgcgaataactatcatcctctgccgatcgtgatttctgaagcggaaggcgcgtgggtgaaagatccggaaggcaaccgatacatggatatgctgagcgcttattccgcagtgaatcaagggcacaggcacccgaaaatcatccaggcgttaaaagatcaggcagacaaaatcaccctgacttcgagagcttttcacaatgaccagcttggtcctttttatgaaaaggtcgcttcattaacggggaaggacatggttctgccgatgaacaccggtgcggaagcggttgagtccgcagttaaagcagcgcggcgctgggcttatgatgtaaaaggcgttccggacaatcaggcggaaattatcgcatgtgaaggcaattttcacggccggacgatgctggctgtgtcgctatcttcagaagaagagtataaacgcggtttcggaccgatgcttcccggcatcaagctgattccatacggggatctggaagcgctgaaacaggcgatcacaccgaatacagccgcttttttaattgagccgattcaaggtgaagcgggaattgtcattccgccggaaggctttttgaagcaggctgctgaagtctgcaaagagcgcaatgtcttgtttatcgccgatgaaatacagtcagggcttgcacgtacagggaaaatgttcgcctctgattgggaggacgtcacaccggatatgtacattttaggtaaagcgctcggaggcggcgtgttcccgatatcgtgcattgcagcaaaccgggatgtgcttggcgtgtttaatccgggctcacacggatcgacctttggagggaacccgcttgcatgcgccgtatcgatcgcagctcttgaagtgctggaagacgagcggctcgctgaacggtcgctggagcttggggaatactttaaagaaaagctctcgcaaattgataatcctaaaatcaaagaagtgcgcggcagggggctgttcatcggggtagagctgaccgaggcggcgcgtccgtattgcgagcgcctgaaagaagaagggctgctctgcaaagaaacgcatgagacggtaattcgctttgcacctcctcttgtcatttctcatgaggatctggattgggcgattgaaaagattacccgtgttttgtcgaagtaaagcgaacggctgaacaataaggggattgttcagcccgttttttcgctgtctgtgcgaagtttgtcaaaaattgaaatatcaggaaaatgttcagaagatttaaaaaatagtctatatgtcatagggggagctgacattagggagaattgaaacggaaggggtgaaggcggtttgaatcatgaaaaccgtgaacaatatacactgaaacgaacgatgaaatcccgccatttgtttatgatctcgcttggcggcgtcatcggaaccggcttttttctcggaacaggttatacgattaatgaagccggaccgatcggcgcgattctttcctatttagcgggcggaatgatcatgtattttacgatgctctgccttggggagctcgctgtggcaatgccggtttcaggctcttttcagacgtacgcgacaaaatttatcgggcctgctacagggtttgccgtcggctggatctattggctcggctggtcggttactgttgctttggaatttttgtcagcggggcagctgatgaaaagatggtttcccgatgtcggcgtctggatatggtgcttgattttcgggctgctgcttttttcactcaatgctttatcggcaaaggctttcggggaatcggaattttggctgtccggcatcaaaattatcgtcattcttctgtttattattctcggcggaggcgcgatgttcggactcatcgacttgaaagacggacaggctgcaccgttcttttccaatctgattggagacggaatttttccaaacggattcggcgcgatctttatcacgatgatcaccgtcaactttgcctttcaggggacggagctgatcgggatcgcggcgggggaaagcgaaaatccggaaaaaacggtgccccgctccatcaaacagacggtctggcggacactggtgtttttcggcctgtccgtatttgtactggcgggattgattccatgggaaaaagcgggggttgttgaaagtccgttcgttgtggtatttgaacaaatcggcattccgtatgccgccgatctgatgaactttgttattttaattgctttgttatcggtggcgaattcgggcttgtacgcatcgacgaggatgctttattccctggcgaaagagggaatggccgctcaggctttaagccgggtcaataaaagaggtattccgatgaatgcgctttggatcacgctcggttttgcgggtttgtccctcatctcaagcgtagtcgcagcagaaacgctctacatttggcttttgtctctagccggtttaagcgcgcaagtcggctggatcacgattacggtatcacagctgctatttcgcagacgatatgtcaaagaaggcggaaaggttgaagacttaaaatttaaaacgcctctttatccttatttgccgctgacgggatttattttaaacagcgccgtccttgtgagcctcgcttttgattcagagcagaggatggcattgtactgcgggattttattcatgtcggcctgctactttgtttatcacgtgtttgtgaaaaaacgccaggctcttgatcgacaagaagcaatgatctatcaaaacaaaacaaacgatgaggtggttattgatgaataaacaagtttctttgattggaatgccgatggacttggggcaggcgcggcgcggtgtggatatgggaccgagcgcgattcgctacgctcatatcgtggagcgcttaaacgagctgggctatgatatcgatgatctgggcgatgtgccgatcaaccgcgatcagccaaaaggagacgaagggctgaaaaatttagtttccgtactggaaggaaaccgcaagctggccgatatcgtcgacaatgtcgtcgagcagcgccgcttcccgctcgtgctgggcggagaccacagcattgccatcgggacattggcgggtgtagccaagcattatcaacagctcggcgtgatttggtatgacgcacacggagacctaaatacgcttgagacatcgccgtcaggcaacatccacggcatgccgctggcggtaagtctcggtgtcggccacgaaaagctggtcaacctccacggctatgcgccgaaaatcaaaccggagcacgtcgtcatcatcggtgcgcgctcgcttgatgaaggagagcgcaaatatatccgtgaaaccggcatgaaagtctataccatgcatgaaattgacaggctcggcatgacgaaggtaatggaggaaacgatcgagtatttgtcagcaaattgcgacggcatccatctgagccttgatctggacggtcttgatccgagtgacgctccgggagtcggcacccctgtcgtcggaggcatcagctacagggaaagccatttggcgatggaaatgctctatgacgcagatatcattacatccgccgagtttgttgaagtcaacccgatactggatcataaaaataaaaccggtgaggcggccgtcgaactgatcgaatcattgttagggaagaaactgctgtaaccaatgcgaaggagagggcatcggcatgatgccttctctttttttattggcgcattcccgggcgcttatcaaaataaagccaaaaattctctcacaggcttcggcagaaaactgccggccctccaaacgacagacggctgcagaatgaacggattgttttgaatttccaatgtctgaacatgccgtgcaaaatgcgccggcagcatggacagcggcagaatcgtcgctccgaatcccgaagtgacgaggctgagaagcgttgtagaatcatggcactcacaaacgaccctcggttcgaggccagatgattgaaagtgatggacgacctcgtcgtaaatcccttttccgtgcgacggcctgagcagaatcagcggcaggccggcaatttctttcattccggcttctccttttaagccatacgactgattccctggaagaacaagcttgcatggaacctccggcaggctttttgattcggtgtttttgctgtggataggcgttgtcgtgacggctgcatcgatctgccggctttccaggagctcgcttagccgtgaaggctcaccttcccaaatgttaaacattaaattcggatacatatctctgatcttcgagacttttgagagcagcagggccgcgcagtaaatcgtcgagccgacggcaagggttccgttgacttcttcacgcagctcccgcacctccaagatggaatcctcaagcttgtgcaggatttcttttgctcttttcaaaaaaacttctccttcgtaggtcaacgtcaggtttttctttttgttccggtcaaataaaacgactccgagctcctcttccatctgcttcaactgcctggagagcggcggctgtgcaatatggagccgcttcgccgccgttgtaatttttccttcccgggcgattgtaacgaagtattttaactggcgaatatccattttcacggcactcctttttatacctttagagtattatatatagatttaacagatattttcaatatggtaaatagaggcgtatcattttaactgaagcaccaggaaggaaagggggggcgcatatgaacatcatcgtcggaatcacgggcgcgaccggcgcggtatttggcgtgcggatgctggagtggctgaagaaaaccgacgcagagacacaccttgtcatctctccgtgggcagcggcaacgatcctgcacgaaacgggatatacgatgaaagacgtggaaaagctcgcatcttttacgtattaccacaaagaccaggcggcccgcatttcaagcggttcctttcaaacggacggaatgattgtcgcaccgtgcagtatgaagacgttggcgggcatccgcaccggtatggcggataacctcttgacccgttcggcggacgtcatgctgaaggaacggaaaaagctcgttctgttaacaagggagacgccgctgaaccagattcatcttgaaaacatgcttgagctgacaaaaatgggggcggtgatcctgccgccgatgccggctttttataatcatccccaaaatctgaccgaaatggtcgatcatatcgtatttcggacgctggaccaatttggcatccatctgtctgaagcgaagcgctgggaaggtatgaaacaggagaaataaggaggataacagaatggcttatcaagattttagagattttttaaatacgctgaaaaaagaaggacagcttcttgaagtccaggaagaggtgaagccggaacccgatttgggagcagctgcacgcgccgccaacaacctcggagacaaatcacccgctcttttattcaacaacatttacggctataacgatgcccaaatcgcgctgaatgtaatcggctcctggccgaaccacgcattaatgctcggccttccaaaagacacgccggttaaagaacaattctttgagttcgcgcgccgttataatcagtttccagtaaaagtgcaaagagaggagacagcgccgtttcacgaaaacgaaatcacagaagacatcaacctgtttgacattctgccgctcttccgcatcaatcagggcgacggcggcttttatttagacaaggcatgcgtcatttcgagagatgtcgaggatccggaccacttcggcaagcaaaacgtcggcatgtacagattgcaggtaaaaggcaaagaccgcctcggcattcagcccgtcccgcagcatgacattgcgatccacctgcgtcaggctgaagagcgcggcgaaaacctgcctgtcacgattgcgctcggctgcgaaccggttattgcaacggcggcatccacaccgctcttatacgatcaatcagaatacgagatggcaggggccctgcaaggcgaaccatataaaatcgtcaaatcaaaactgtctaacttagatatcccatggggcgcagaagtggttctcgaaggtgagatccttgcgggcgaacgcgagtatgaaggtccgttcggcgagtttaccggccactattcaggcggacgaagcatgccgatcatcaaaatcaagcgcgtctgccaccgcaacaatccgatttttgaacacctgtatttaggcatgccttggactgaggttgactatatggtcggcattaatacatgtgtgccgctttaccagcagcttaaagaggcgtatccgaatgaaattgtcgcggtaaacgcgatgtatacgcacggcttgatcgccattgtatcaacgaaaagccgctacggcggattcgccaaagccgtcggcatgcgcgcgctgacaactccgcacggcctcggctactgcaaaatggtgatcctcgttgacgaagacgtcgatccgtttaacctcccgcaagtgatgtgggcaatctcaacgaaaatgcatccgaaacacgatgcagtcatcatcccggatttatccgttttggcgctagatccaggttctgaaccggcgggaatcacccacaaaatgatattggacgcgacaacgccggctgcaccggaaacaaggggacactattcacagccgctcgattcccctataggaacgaaagagtgggaagcaaaattaatgaatctgctaaatcaataaaagaggagagtgtttcatcatgcatacatgtccgcgctgcgaattaaaaaaagcggaaaccgtcagcaaatcacccgttgaaggagcctgggaagtctatcaatgccagcactgctttttcacttggaggtcatcagagccggagacgatcacaaatcctgaaaaatacaatccggcctttaaaatcgatcccgctgaagttgaaacagctgtacaagtgccggcgattccagaccggaaaatctaaagggaggcatccggcatggctcagctatcaaacgaactatttcagcttttaaacggagagaagctcgccggtaagcggcacgaagcgatgatgctccagaccgtcacagaagacggctggccgcacacggcgatgatcagcgccggcgaaatccttgccctgaacaaaaccgacatccgcctggctctctggcaaggcacaacgacgaccgcgaatattgcgagaacaggacgggcgctcttcgtcgcttgctggaaaggcaaagcacattatgtgcggctgtctttaaagaaactgcccgaattaagagacgccaaacacccgagagcgcgcttcgccggtacggtcgaagcggcccgggaagatatcgcaaaatacgctgatatcatctccggcgttcagattaagctgaaggatgaagcggcggttttgcggcggtgggaagagacgctgggggagctgaggaaatgaagaaaaggaccatggcgaaccatggtcctttcaattatttctgcagcattttattcgtcactttataagccaggatacagcaaattgtaataaaaataatggcgatcgaaaggatcacgagcttttcagcaacggtatatatcggcatgggaagaatagcagcgcagacggcaaacaggctgccaaaataaacaaacaggatcagaggctttttgtattttttccaaatcacttgattaatcccgtttttttcgggatctgccgggtgtttgcggtcttcatctttcatcaatttatttagcagtagataaatgagaaatgcgaataaagttgccgagaaaatattaaaacagaggataaacagcttttccccgatgctcatcttcggattcagaacggcgcttagaacggagccgcatacgaaaaacaggtagacggataagatggctttgtttcttggtttttgtagaaaattagacattcggatctctccaattgtaaatgatttaaacgctgaaaatgagatggaccagaaaagaaaaaatataaaagatgatgatgcttaagatgcctctgcccacaagataaagggcgaaatacagttttctcaggaaccagttgtatcttaatagccgtttgtaaacaaagtagccggtgccgacaagaagaaaaacgaatgtatttgtgattttatgggaccgtttttcaggttttaaaaagatcattttttcatattcaatgatcatatgactcgcaatgattaaaaaacacaaactgtaagcgaaatgagcggccaacataccggcgattaagtattcggtatattcaacaaaagtttctggtgacatcataactcctttatgaatagcggtctcaagcgttttttaactgacataaaaagcttttcattcttcgtcaggcattctttccaaacaagaccggttcagcatttgattcgccgtttgataaaccgcaaaaaaattgcccgatatcacggcaaacagaatcgcaaacatgccggatttccaagcgagtgagagttcggacatggaaaacacggatattcccacaatcagtatgccgacgaagtagaaagagagcgtgaacggttttctgtgtttcttccaaaagattttcgcgacgatgttgcatcggggcgcgctttgatctttcttcggcttatttataaacacataaatgatgaatgtgaataaagaaattgaaacgaacataaagccgatgacggcaagcctttccttccagttgattgcaggtttgacaagggcggccaaaatgatgattgttgcatatagggaataaactaagaaaatgattttatttctgcctttcaaacatgacatctccttgtgccttaaatcctatgctgtctgatgatatcttgattcgctttgatgaagaagtatttgtggatgaatttgacccccattatagaaaataaacaagccataagcagatagacgatactcatcaacaaatagacggcagactctgaaactcgcaaaacagcatgacttatcatataaccggccgccggaacagccgccaaaagcatccctgtcggagctgctgtctcccttttgcctcttttaggatcagggaatacagccaagtaataccgaatgacgaggaagatagaggcggcatatatgaatagtgacagactgatctgcgccgtgatcagctggcaatatgacataccgctgaaagatacgcccataaaccgaacatattgaaggtgatgaagatattcggtcatgtttctggtatttatgaggatcatccaaacattgatcagaatagcgacagggaggacggcaaaagtgaaaaattcgactttgctcgccagcacaggtaatatgcagagaatatccagcaccaacacgataaaacaggccattccccatttcgtttcccggctgacgggagccttcaaatgagattgaatattgtaaggtaaatctttgtatacaaccgtttcttttaatctcagcaaaacttatattcctccgcttatccctctgaatttttataattctccatgtgttttttcagccagaccttttttctgaagatatgcaataggagcggaagaacgaaaaagaacaagctgataaccgaaacaaacaagggaatttctgaaggggcttgttccaataaaccccatatcgtcatgatgacaaaaaagataccaaccacagggaataaaatcgtgaagatgatcatagcttcgtttatttttttatatagaaaatttttttcgtttttcatattgagccccttttcttgatgggtgttttctgcatcggcaacgtttggctttgtgttttttcatatctcgtctatcttcttgaaacaataattcgggaaactgagataagagaaagcatcccgatgtgagatgctttgaaatgtatttattctcgcattgcggcattatgtattttgaaaagatactgtatactcaagcccttttaataattcgttccattgctcaagtgtccttaatgaaatatgtacaggtttttcattgtgttcatcatactgagcaacccaaacgccacgggcagatggaataaaaaagacgatattttgcaagaaaggtccatcgtttaagctagggatgtaaaaatgtgagatgttgtttagcgaccattggtttgcttcaagatcggctatcaattgattaaagctatgttcttcctccggtgaaaaagaacttttcttccgaaccttttctgtcatgtctttattactcagccagtcaaagcatttatctgaaagacgaaattttaaaggaatatgttcctcatcagttgaaaagtggtaatagtctttcatcagctgggcaatttcctgctcgtcgacatacgcaaattcatggatgatatcgcggtcaatcatatggaaaagccatgtttcattttcaaaatggtgaagcattaaagtgtttttattgtcaaggttggaacagcggatcatttgttctgaattcacataggaaacgatgaatttctgcatttcttcgcttaaaggattttcgtcttttgaacttttttcttcgttccagtattgttttaaaatgagctggttgacagttgcctctaagattgcatcccattctttttttgatttttttcctaacgatgattcaagaattccttttgcaacaccaggatagtcacataaccctactaaaagcgctagttcttctgatgtacatgtgatgaggtgtttcattgttttcacatccttgattataaacttaaaccttgaaaatgaagtgaaggataaatgataaaatatagaaaatgatgatacttaaaataccgctccccagaaggtaaagggcataataaaattttcttaggaacaagttatatctatatagtcgtttatatgtaaaataacttgcaccaaaaatcaatgcaaaaccgaaattaacagtttttttaaatatatttgaggggggtctgaaagtcccctgctcataataattcatagttatatacccaagaaataaagtgcaaagtccaaatacaaattgagaacttaaaatagcagcaatcaaatattcagcatattcaacaaatactttcggcgtcataatgcctcctatctatttaaaccaacttttcacagactcaaaactgtttttaattcctttttcaatagaaccagcaactttttcaccagcatccttaattgcatcaccgtatgaagagctagcaattgctccagctactccgcctatcgctccaccaacaatcactcccacaggaccgccgacgcttcctattgttgctccaatttcaacacctgtagaaacagcaaaaatgtctgtaccaacacctgctgcgaaacgtcctgttttttctgcaaaacttttgtccgagttctcgggatcggtatattctgtaaggttagaagcgaaagtaactgcggtaccaacaatagggactcctctttctaatgcagtaaacccttttgccttggctgtggactccattatatcaaccgcacccgcttttgtcctcagggcagctctcttgcgaaattctttcccatctataaaactatgttgatttttagggaaccccacagcatgtttaaacatcatggatggactatcataagaagcgacaaatttttgcgcttttttaagtaatgggttgcttggattcgagtcagagatgtttttaatggttctcgcaactttcgaactgtgatccccttgagaagtccaagaacgatgtgacatgacctgaaatttatattcccctttaaatcgctgccacttcgtcggttttcctccttgataataaatttttaattttcgcgtccacgcgattgatgctgttgcgttggctgcgtgataccctaataaggctttatcaccgacatctaatggttctccgactgtttcgaagtaactaagaatttcgtgtgctatatttgttttttctttatcctgtgtatcaggattcgttaacgtttctgccgctttttcttctaatcgcccaagcatcttttccatcggtgtttcgccggggttttgtaggtcgttttgcaggccgccgggagcttgactgattgttgagtcattttgcggttttaaaattgaaccgcttttatattccgatatttcaatcttcggccccgtatacattttctccagctgctggatgtattgcttcatcgtatcgaggtcttctctcgccgctttcagcgcatttgtctgttcgcggtcgaaggtgtggagcttttcgagcgtctcgctgatttgtctttgcgctttttttgcgttttcgttgacggctgaatcgtctaggtcgggcaggtcgacgatgtggctgacggtggccatcgtctggttggcttttgacgtcaatctgccagtcagcgattcggcttgactgacgccgtcatggagttcgttctcaagaaagctttgcgagataaagccgttttggttcggttcaagggaatgaagcgcacttttcgtcttttctaaaagtcctttatagtcggaaataaaagattcataaaaaagaagaaaagtggtgtggcattcttcgtagaacgagcggatcgcttcaccgcccgcgccttttaaggcgtcgtcaagggaggtgaggcctttgatgctttgtttgacttttgaaatctcgtcagtctggttttttaattcggtcagcgttttgtctaggccggtttgaaaagcctgaacatctagagttttcaatgcgtagtcccttccttctacttggctttgatcgatgacgacagctttttgtcggcgtcttttatggcgttgacagcctgctcggtttgcgcaatttgtttagcgagagccgatgcgtatgcttttgtcaggcttttcaaatctttgttcatgctttcgatttttttgacgacgtcaaggttgtttttgccgctgatatctgtcggcacgttcggcttcacggcttgggctgaatgcttcagttttgagagcgcctgtttgacttcgcccgttttgactttgatttcttgacccatcgtaatcactcctttagcggcgggcttctctttcttctttttccagtttttcgattttcgtttttaatgagctgatatccttacctagcgaatcaatatcatcatttaaagaagagattttctcttttaattgtttaaacacttcatttagctgctttccgcaaatatcattataggccgttttcatatcgcttctgacgtttttaaaagaatcagccaggctgccctgccatgtcgtcggcgacagttcgggctttttgatgctgtcttttgaatcgtcaaattcctttttatctgcttctaattcagtttggcaatttttcagttgttcgagctgttgttttttgatgagaagtgtaccttgcagcccgtataaaactgttttttcccagatcatgttactgccacctcccggaaaatttgattcaaatgacctgttgggttccgttcattaaaggaccttattaatgttacaacatggtataaatgagttgaataggaaaaatgtaccgtgaacaaagaatctagttgagcggtggagcaggggattccttattatgactgcgattttgcacatttctccattttcctgcaaggtcaaaagacatagttcttaagttttggatttttggtgtatttattttttgtttcacaaactttaaggtaattttaagaaagaggcgatcttgccaaccctaaacagggtttttcgaacagaatgtcaaatagattagatatttcataagaacaagggggaattgtctgtttgtgatgaataaaggaggacgggcggaatttctgtcaggatgctcagctgggttcttagaaaaaaatgcggctaaatatatatttatagattgtaaacgctgtcttgtcctcgaccaacagggggatgaagatgaagaagctgttagttgtttatgccgtgatgctctgtttgttttttctgtatgtctacgactactcccggggcgataaagccggttctgcagaagaaagcaggaggcctgcggccgcaggcagtctgtccgaaaaatacgtgatggtcacgtttcaatcgggaatcgaatattggaagagcggtctgaaaggctttgaggatgccgcgcagcttttcaacgtctctgtcgagtatcggggggcggcccattatgatgtccatgagcaaacgaccgtcctcgagcaggtgattgcaaaaaaaccggcgggaatcgctgtttcggcaataaacccaaaagctttaaaccctgtcatcgacaaggcgcacgagcagggtattccgatcgttttatttgattcagacgccccgctcagcaaagcttctacatatatcggcacaaataatatggaagcgggtgctgtggccgcaaggcgaatggccgaatttttgaatggaaagggagaaaccgcggtcattacccagccgcagcagtacaatcatcaggaaaggacgaagggctttgaacaaacgatcaagcaaaaatacccgaacatgaaggttgccgcggttttggacggaaaaggggatgagctgacgtcgaaaaaagaagcggcgaagattttggaggaaaatccgtccatcaaaggaattttcacgactgaagccaatggagcgagcggcgtggcccgtgctgtgaaggaggcgggacttgaaggggaagtatgtatcatcggctttgataaagacaagaaaacgctggacggcatcaaaaacggatcgatttccgcgacaatgagccaggacacatggcaaatgggctattggtcgctgcacatgctgtttttctcaaatcaccatctgaagcatgaacgcccgcttccggccgcaatcgacacaggcattaccatcataacgaaagaaaatgtggcagcctattatgcgaatgattaaacgtttgatcaataatgcgccgatccgtcataagctgatcagccttctcttgttaatcagcatgctgccgacgatcggcctgggcattttatcgggatgggccgttgaaaatattattgaaaaacaggtgatcgaccaaacactgcagctgatcggcgaagtgaacaagacggctgaagtgtatgtcagccacatgcagaacctgacatatttaatatcaatgaatgaagaaatggaagcgttttttagtcataaaaaggaggatggagaggcggattataagcgaaggacgtttttgcagggcctgacttctttatattccgaagcagcgggtattctcgttgtcaatgataagggtgagatgatcagcaatgagatgtatgaacgcacgccgacagatttgacaaaagaaccatggtatcaggcggctctcgacaatgaagggattttcaagatgatcgggaagcctgtcaaccggaatatcagaagccatgtgcactatagggaagatgaggtcgtttccgccgtcagagctgttatcgatcctgaaacacagcatgtgaaaggcgttgtactcatcgatttgaagctgcgcgtcctcgcagaagcgacaaaaaatatccgcttggggaaaacgggttatttgatgatcatggatgaaaatggcggcaatatttattcgccggagacttcgaatctatttctgccgaaaaagtggttccgtcaagaacgttctggatatttttcgaagcggatcaagggagaggaatatcagttcatttatgagacgtcttcctttacgaactggacgactgtcggcgtttttaaagcgggtgaaccggttttcgaagtgaaggaaatccacttgtatgtgcttttgtttttattgacggcggcgtttctcggaatgtcagcttcctattatttgtcccattccatgtcgcggccgattttgaagctgaatgctgtcatgaaaacggcggaaagcgggaatttttcaacattgtatcaggaggaaagggaagatgaaatcggccttttgggaaaaagcttcaatcgcctgatgttcagaatccgcgagctgatgtccgttacagaaagacaggagcgccaaaaaagagaagccgaattaagagcgctgcaggcgcagatcaaccctcactttctctacaatacgctggatacaatcaattggatggcaaggaaaaaaggagcggaagaggtcagcgatctcgtgcaggctttatccaagctgttccgcatttccttgagcaaagggaaagatatcatcccgctgtctgatgaatttgaacatgttgaaaactatttgaaaatccaaaaagcgagataccgcgataaattaaactactcaatcgaaatgaccgggctttgtgatgaccgcctgattttgaagctcgttcttcagcctatcgtcgaaaatgcgatctatcacggaattaaagaaaaaaaggggccggggcatattgcgatcaaaggcatggaggaggatggctcgctaatcatcaaaatcgaggatgacggagccggaatggatgaagagacgctaaagcaaataacggatcaattcaaacacagggacgatacagcgggctacggcatgatcaacgtccatgaacggatcgctcttacatttggcgagccgtacggtataacggttgaaagtcggaaaggagccggaaccgccgtcacgatacggctaccaattttagcaaaagggggaacaagccttgagtgaatgttggcgcgtactgattgccgatgatgaaccgtggattcgggaaggaatacgggatgccgtctcttgggagcgctatcaaatgtcggtgtcggctgaagcggagaatggcgaggaggcttttgagctcgctctcaaacacggtatcgacttattgattgtcgacttgaatatgccgatcgtaaacggaattgccttgatgaaaaagctccgcggcgccttgccccagtgccgctttgtcatcgtgacgggctacgatcagtttgcatacgcgcaagaagcgatccggctgaatgttgatgattatttgttaaagccggtcgatcccgctcatctggaacaagtgctcaaaaagatcagcgtgtcgcttgcagctgagaaaaagaagctgagcgagcaaaagcttgctgagcagcatattcaacaaaacctcggccttctgaaggagcatgttttcagaagctggatcgaaaaccgggcagacgaagaagacgtttaccggcagctcgaatgcctccgtctgccggcgcgcaatcctgaaacgctcggcgtcatcgcggctggacatgtatggaacaaaccgtctgaagccgacaatctgaaagaaaaagtagaacgtttttttattaacgagcgagataaagccgtatttttcgacggagaccgcctgatcgccgcctgtctgtggcgttctgttacggaagccgaacagcgggcgcttgcagagatgatcaaagccgaattgcaggcaagcgcagccgtctgttttgcgaagcttgctgaaaacggccgctcagccgcgcaatgctatcagcactgcaggcagcaagtgtcgaaagcattcaatatctcgccggttgtcataagggccaaggagtatatgcaaaagcatttcactgaaagggagttttctttaaaacagatggcggatgcgcttcaagtctcgtccgtctatttgagcagaatgatgaagaaggagctcggcgtgacatttgttcagcttttgacggagatgcgcatggatcaagcggttcacctgttagagacaacccctctttcaattcatgacattgccgaacaaacgggctatgatacacagcactatttcagcactgtatttaaaaagacgatgggtgtatcccccaatcagtaccgccgcatgtcgggaattgaaagaacaggaggaaaattgtaatgtaagcgcttcaaaaaagtctgatttttataaaaatagttaattaattcaaaagacggacattcgaaagacatggtacagttggcatgattcatgatgggagaaatcaaaaagggggataccaagcatgaaaaaatgctggctgttgatcactgcaatgcttttctgtctcatcgttaccgcttgttcggggaatcaggcaagcggagggggagacaaaggctacgtcggaatctcaatgccgacaaagtcatcggaacgctgggtgtatgacgggaaatacatggtgaaagagtttgaaaagctcggttataaaacggatctgcagtatgcggaagatgtcgttgaaaaccaagtttcacaaatcgaaaatatgattacaaagggcgtcaatgtgcttgtcattgcttcgattgacggagaagcgctgaccgacgtcctagagaaagcaaacaagcaggatattaaagtcatttcttatgaccggctgctcatgaacagcaaacatgtcgactattatgcgacatttgacaatcataaagtcggggaacttcaagggaaatatattgaagaaaagcttggcttaaaagacaaaaaagggccgttcaacatcgaattgttcgcgggatcgcccgacgacaacaacgcgcatttcttttttgacggcgccatgtctgttttgaagccttatatcgattcgggcaaattaaaggtgttgagcggccagacttcatttgagcaaggggcgacgctcaggtgggacggcgcaaccgcacaatcccggatggacaatttgctgagtgcgcattatacaaaggcgaagcttgatgcggtgctttcaccgtatgacggaatcagcatcggaatcatttcatccttaaaaggtgcgggctacggctcggacaagaagccgctgccggttattacgggacaggatgcagagcttgcttccgtgaattcgatcattaaaggggagcagacctcaaccattttcaaagatacgagagagctggcgaaaaaagccgttgagatggcgtcatccgtcttaaaaggcgaaaaagcggaagtcaatgacacaaagacgtatgacaacggagagaaggtcgttccatcatacctgcttgaaccggtcgtcgtcgacaaagagaactacaaaaaagtgctcgttgacggcggttactataaagaatcggaattagggaagtgatccgatgtccgattgcattttagagatgagaggcatcacgaaggagtttcccggcgtcaaagcgctcgacaatgtccaccttcgcgttaaagcgggcgaaatccatgccctctgcggggaaaacggggcgggcaagtcgactttgatgaaggtgctgagcggcgtctatccgtacggtgcgtatacgggcgacattttatataaaggggaagtatgccaattcaaaaatattaagcaaagcgaggaagcggggatcgtcatcatccaccaggagctggcgctcgtcccccagctttccattgcggaaaatctttttttgggcaatgaacaggccagccgcggcgtcatcaattggcgaaagacaaagctggaaacgctcgaattaatgaaaaaagtcgggcttcaagaatctccggatacgcttgtttcccaaatcggcgtcggaaagcagcagcttgttgaaatcgccaaagctttggcaaaaaaagtgcagctcttgattttggatgaaccgacggcggctttaaatgaagctgacagcgagaatctgctgcagctcttgctcgaactgaaaaaacagggaatctcttcgattatgatttcccataaattaaatgaagttacgaaagtcgcagattcgattaccgtgctccgggacggacagacgatcgaaacgcttgatgttcaaagcgggcaattgactgaaaaccggatcatcagaggcatggtcggcagggagctgcaaaaccgctaccctgacagaagcgccgagatcggcgacgtcatctttgaagtgaaggattggacagttcaccatcctcttcaacaggaccgcaaagtggtaaacatggcggcgttttccgtgaaaagaggcgagatcgcaggaattgccggactgatgggctccggaaggacggagctggcgatgagcatttttggaagatcatatgggaaaaacatttccggcacaatcgaaaaagacgggcgggagctttacatcaaccaccctgaagatgccattaaaaacggcatcgtctatgtgacggaggacaggaaaggaaacggtttgattctgaaggacagcattaaagaaaacattacgctgtcgaaactggataaggtgtcgagccgattggtgatggacgagcggcgcgaacaacatgaagcggaggattttcgccggaaattaaacatcaagacgcccgatatcagccagcggaccggaaatttaagcggaggcaaccagcagaaggtcatgctgagcaagtggattttcgcggagcctgacgttttaatcctggatgaaccgacgcgcggcatcgatgtcggcgccaaatacgaaatctacggcgtcatcaatcagcttgccgaagcgggtaaagcggttatcatgatctcttcggagcttcccgagctgctggggatgtgcgacagaatctatacgatgtgtgagggggaaatcaccgccgaattttccaaagaagaagccgatcaggagaagctgatgaaatatatgaccatccgcatgaagagagggggagaagcgtatgcagacaccggtgcaaacggataaagaccgcgctcagcccggctactttcagctgtttcgcgatatgtataagcagaatatccggaaatacagcatggtcattgcgctcgtgtttattatgctgctgtttcaaatattgacagacggaattttgctgagaccgctgaacattacgaacctgattttgcaaaacagctacattctcattttagcgattgggatgatgctcgtcatcatcacgggacacattgatctatcagtcggttcagtcgccgcttttgtcggcgccgtctccgcgatgatgatcattgaaaacgatatgccgctgtttgcggcggtcgtcctgtcgttgcttctgggagcggcaatcggcgcctggcagggtttttggatcgcttatgtcaagattccggccttcatcgtgacgctggcgggaatgcttttgttcagagggctcacgatgatcgtgctggaggggaaatcgatcgctccgtttcctgtgtccttccaaaaaatggcgtccggttttattccggactggctgaacggaggcacgttccatttgacgacgattgtcgccggagcgggtgtgtcgattctttatctcgtatatcagcttcagcagagaaacatgcagaagaaattccaatttgacttgcagggaaaaggtctgtttacagttaaggtgttttttatcatcgccattatcaacctttttacctacattctcgcgacttatgaaggtatacctctcattttgatcacattgttcgtcttaatcgccgggtatacattcgttatgaaaaaaaccgtcatcgggcggagaatctacgcgatcggcggcaatgaaaaagcagccgagctttcaggaatcaaaacaaaacggctcacctttatggtcttcgtcaatatgggcgtcttagcagccctttcaggcttgatttttgccgcccgtctaaacgcggccactccgaaagcaggaaacctgtttgaacttgacgccattgcggcctgcttcatcggcggggcttcggcttacggcggtatcggcacgatcggcggggccatcatcggcggtcttgtcatgggagtcatgaacaacggtatgtcgctgctcggcctgggcatcgactggcagcaggcgataaaaggcctcgtccttctgattgccgttgcatttgatatttacaataagaataaaacttcttaattcataagaaaaacctgtttttgaacttcaaaaacaggttttttcattattgctggacggaacgcccttcctgattcagtgttggatttatttttttaggttccggcagcaggatgttcaaaatgcttgctaccgccaaaataacgattgaaaggtagaaagacaggttatagttgcctgtttggctgtaccagacgcccggcaaataagccccgagcgccgaaccgatctggtggctgaggaatagccagccgagaatgaacccgacggaatactgcctgaaatactgggttgccagcatttgcgtcggggcgacggtcgcaaagtcgaccaaaccgaacaaaaccgcgaagcaaagcaggagcatcgagttgtggctcgacaacagaatgacaagcgacagcgcccttacggcatataaaaagcacaaaattttccggctgctccagcggtcagcgacgacgccggaaatcaaaatgccgatgatgttaaacccggccagcaggctgacagcggcgcttgttacttcggtcgaaaacccgtggtcatgcgaaaaagggataagatgggtatccattaaccccgttgttgtaaatccgcaaatgaaaaacggcaagacgaggaaccaaaacgttcttttgagaaaaacggctttgtatggaatctttttcggctgggcgtccggctcttcttttatctcgccgccctgagcgccgccgatcggctgtacattcttttccgaaggatggttccgcaataacaagatgacgatcggaaatacaataacggctaaaaacaatcccagaacaatgacggtcactttccagttaaaccagtggatcatcatgagcgatccagggacaagcagcatctgtcccgcaccgaatcccgcttccatgatgccgaatgcaagcccgcgcttctcattgaaccaattggtcacgatcacggtcgacgcgacattcgacgcaccgccgacgccgagagaaacgatgatgccatacaaaataaacagctgccacggagaagtcacgagatatgtaaaaaagatgctcaagccgaccagaagcgtgctgagggataaaatgatccgcggtccgaagcggtcgacaagcctgccgatcaccggctgggacacgccatatacaatgaagctcagcatggaaataagcgaaatcgtgcccctgtccattgaaaattcctcttcccaaggctgaataaaggctccgaaagaaaggcgcactccttgaacggccaaaagcgtcaaaaacgtcacaaaaacgataatccaggcgtagtgtattttccgtttcatagatcctccatttcgtcagcctaactcggcatcccagcgttcttcccggagccgctgcccccataataaagtctcgtctttcacttccgtcagtctgaatccgaatttttcatacaaaggccgtgcttcggccatcgtgcttaccgtccataaaaaaatccgctcatactgattttctttgcaataatcgatgagatgctccaagaggcgtgtgccgactccctggtgccgaaaagcggcgtcgaccagaaaccatctgagctgcacggtcctgccggggtgtttgacgagcccgacacatcccgcgaatcttccggcgctctctgcgatccagattttttcgatctcggcgtcgaatgtttcgtgaaggtaatccaaaaatgaatcgtcccagccgtgtgtctccgcgtagaaggcacgctgtttttcgatcatcagtttgatatcgtccgatatatagtaatctcttatagaaacggccgatttttcgggaggcaggtgttccgacaatatgcattcaattgtattcattgcctccgtcagcttttcctgatggcggccgtcgatatgcttcagcatgttttcgatttgttgattggctttggcctccagctttttataaatggattcaccgaagctggttaagtagatatagtggttgcggctgtcctcctcgcttctctttttatagaccatattttctttttcaaaccgcttcaggatccggctgacatagccccggtccaggccgagcgtatcttgaatcagtttggctgtacaatcggccgtattgtgaatttcaaataatatccgggtttccgtcaatgaaaaagggctgtcataaatatgttcattcagaaaaccgagcacatttgtatagaatcgattgaactttctgaattttaatgttgtagaatgattgatttccgccatctcaaaacctctctccctgtaaatcgttgctttaatcaattataataaattagttgatttagtcaagtgtatggaaataaagttaaaaatgttaatgatagaatatattttacaaataaagaaagagaaattcaatcgtacaggaaaattcatccaccttggcaggaaagagggaagaaaacagagtatataatctaacaacctgtttttgaaagcgtttttagtgtcatgtccgtctccgcgtcatatgaaaacgaggaagaaaggatgaaactgtaggatggttaaaccgtatcccccgatcagccggaaagttccccgactattgcatggagccgattacaacccggatcaatggcttaaatatccggacgtattaaaagaagatatccgcctgatgaaactgtcccgctgcaatgtgatgtctgtcggcattttctcctgggtttcgctcgagcctgaagaaggaagatttacatttgactggctcgatcaggttcttgatactttcaaggaaaacggaatttatgcgtttttggctacaccgagcggtgccagaccggcttggatgtccaaaaagtatccagaggtgctgagaacggagcgcaacagggtcagaaaccttcacggaaagcggcacaatcactgctatacgtcgcctgtctaccgccggaaaacggcgatcataaacggaaagctcgcggagcgctatgcgcatcacccggccgtcatcggctggcacatttctaatgaatacggcggagaatgccattgtgaactttgccaagacaagttcagagagtggctgctggcgaaatacaaaacgctggaccgccttaatgatgcatggtggacatcgttttggagccatacctatatagaatgggacgagatcgagtcgccggctccgcacggcgaggatgccgttcacggtctgaatttggactggaagcgttttgtcacggatcaaacggttgatttttgccggcatgaaatcgcccacgtccgttcgtttaaccctgatctgcctgtgacgacgaattttatgggaacgtatgccggattgaattattggaagtttgccgatttgcttgatgtcatctcgtgggattcttatccggcatggcacaacagccggcaggaagacagccggcttggagccgatattgcttttgttcatgacatcaatcgctctcttaaaggcggccggccgttcatgctgatggaaagcacgccgagcatgacgaactggcaggatgtcagcaagctgaagcgccccggtatgcatgaattgtcgtcattacaggcagtcgctcacggatcggacaccgttcagtattttcaatggcggaaaagccgcgggtcaagcgaaaaatttcacggagcagtcgttgatcatgaaggatcagagcatacgcgcgtttttcaggaagtgaaaaagctcggggaaaagctcgaaaagctggaggacgtcgcagggacgacagtcgaacccgaggccgcgattatatttgactgggagaatcgctgggctttggaagatgcccaaggtccgcgcaatatcggaaagcattatgaacggaccgccaaatcgttttatgaaccgttttggcgggaaggcgtaccggttgatgtgattcacatggaggctgatttctcccgctataagcttttggtcgccccgatgctctacatgctgaaggaaggcaccgctgaaaggattgaacagtttgttcaaaacggagggacatttgtcgccacttattggtcgggcattgttgatgagaatgatcttacgttcctgggagggtttcctgggggcttaagaaaaacgctcggcatttggtctgaggagatcgatgctcttcatgacggacagaaaaataccattgtgatggatgaagaaaacaggctcggattaagcggaagctatgaagccagcgagctttgcgatctgattcatttagaaggggccgaagcgctcgctgcgtacgaggatgatttttacgcgggccggccggcgctgacggtcaatttgttcggagacgggaaggcctactatatcgcttcaaggaatgaggcggcgttccaagaggcgtttatatccaggctcattgaagagtgcgggattgccaaagtgctcgatacagagctcccgaaaggcgtcaccgcccagctccgcacagacggccgccacgattatattttcgtgatgaattttacagcggaaagcagaagtgtctcgcttccggaggaaacatacacggacgttttaaagggaacccagaaaaaaggcgcgctcaaactgccgccttacggaacgagcattttacggagaagccataaggcctaggaagccttacttttcaggccgacgcttcgtgcaaaatgcagctgcaagcaggaagatgacagcagaagtgtacgccaatacaccttgattaaaaacgcagagaaacatgataaaaccgccaacatgataaacactacggcatagagatttaaacgcaataccatccctccattaatagttatcttaacataaaggaatgtgaaaaatccgcgggcatttcccgcggatccgtcgttatttggctcgttttttcagttttcggggattgacctgatcatcgatatcaggcttgtcgtccagcgcgtcagcaattttttcccaggagacaattttgaagttctgattggctggctgtccattttccgtattttcgccgtcttgggcgacaaagatgccgtatggatattttttgccgaggccgaagccgatgacgtcgattccatcggtatcgcttgtcccgtcgatttctttaccgtcatcaattgaaaaatcggcgacatagtcgtttttcccgcgccggtcatagatggcataacggttatcgccctgactggacgcgatcaaatatccttcgccgtcttctccgtagtaaatcgtcagcccttcaatatcagcggttaaatgcggtccgcctgcgcgatcgacaatttttcctttatctccgccgtttggctcggcgctgaaagaccaaatcgcagcgtcttcttcagcgatgtacattttgccgtattcatcatctgctgcaagcccttctgtttgagagctcattttgaatgagcggacctttttgccttcgacttgtccttttccgttgtcaaacagttcgtattgctcgaattctccgttctttccggtcaccatggcgtagaacttgccggttttctggctgtgatacaggctgaaaccatacacctcctcaatatcggtttgaataggtttttgaggattgacgatgtttttcagcttgtttttttcgccgtcaaaggcgtatatttcaaccgtgtttttgccgtctgaccggtttgaggccccggcaatatcaatttttttgccatcgagcggaaaattgtagcggagatcgacgttgtttaatttgccaaacggataggctgccagctgttttccgtttaaatcgtaaacgatcaagccagattttttatttgttgtgatcagccggcttttttcaggctgcttcggatgaacccaaatcgccgggtcatctgccgcgtcgtcaggggtatccaccggctctgtctctgcatcggcagtcaccgagaagtccttataagctgaagcttcggcacgggggagaatgctccatgagggagacaataaggatgccgcaagagttgataaggcgagcgttttgtaaaagttcatatattaacctccttttgataacacttatactagcaaatcaatgaaaactatcatttgaggaaatgtaaacttttgttaaaaaagcggtggtttaaaggggctgtgagatttagcatacgaagccgcagagaaaacccccggaattctttccgggggttttgctttaacaggtattccctatctctcattaaatcgaaatgtatatatcctgcgaaaaaacagaagaaaaggagtatcagcctattgctttttaattaacacccttcataaatttctgaattttcggtgacagcagcatcaaaatgatcccgagcaggatggatacaccgccgatgatgccgaagtaggcgatctcggtatcaacgctgtaaaatctgacgatctgtgcgttgatggcctgtgcagaagcgtttgacaggaaccatagactcatcgtctgcgctgagaaagcagcaggagccagctttgacgttgcggataacccgactggagacaagcacaattccccgagaacgacgatcaggaagctgagcacaagccacattggattggcaagcgattcagtgccgttgatgtaagcagggaaaatcatgacgacaaatgacagtccggctaaaatcaacccgagtgaaaacttcgtcggcgttgacggctgacggtttccgagcctcatccaaatccatgcgaaaaccggtgcaagcacaacgatgaacaacggattcagcgactggaaccaagaagagtgcaattggacacctaaaaattccaaatgagtgcgtttatctgcataggtggctaaaatattggcgccttgttcctgaatcgcccaaaacatcatcgatgcgacaaacagcggaatgtaagctgtgagacgggaacgttcatcactcgtcgttttggagcttttaaacatgacgatgaaataaatcagcgggatcaaaataccgagacagctgacgatcatcgtaaacagctcgattgtcatccagcccataaaggcggaatagccaaagatggcagcaatcaccaaaacaccgattccaatccgtccgaacaccatttttctttcagcgggtgtcagcggattcggcaccgttcttccggcagatccgaggtttttcttccgcgtcgctaaataggtcagcagtccgaacaacatgccgatggcagcaaggctgaagccgagatggtagttgtatgtctgaccgactgtgccgacgataatcggcgcgagaaatccgccaaggttgattcccatatagaagatgctgaaaccagaatcgcggcgggtgtcttcagggctgtacaaatcgccgacaacgcttgatacgttaggttttaaaaggcctgtcccaatgatgatcaagaacatgctgatgaagaaagcggggacgcttcccgggaatgacaaaagaatgtgtccgaacataatgagcacgccgccgtaaaacacggtgtttgcagttccgaggagcctgtccgctatccagcccccgataatgccggacatatagacgagggaaccatatacggccataatcgagttcgctgtcgtttgatcaaacccgaggccgccttttgtcacctctgtatacaaataatagataaggatggctctcatgccgtagtatgaaaagcgctcccaaaattcagtgaagaataaggtgaagagtccgcggggatgtccaaaaaaccccttttgcggaatgttttgaaaagtttctttttgatggtttgacattcgcaatactccttctctttctatgtctattataaaaatcatattcttatataatgttcgtgtcaatacaccttcaatcgatttgaatttttgatcgatgatgccacaagttgtgaagcgctttacaagcggatagaaaaaaattttgggagaaaatttggattgaaagattttttaataaaattttatctatttatgtacaagcggattttactagattggcatatatataaagcaaaccgttttacaaaaggaggctgaaaacagcgtgcagcagcaacctgatgaaatgagaatgacagtggttgacgcgacaaagttcggcgctgtcggcgacggcaaaacagactccacaaatgcgatcaacgaatgtttggcatggacaaagtcgatgggatacaacacggtgtggataccgaacggcacgtacatgattgacgggacgaaaaacggcgacccgcgggctccgtttcgcggcgccggcatcaatgttcccggcaatattgaaattttgatggacgcggaggctgtcatcaaggtaaagccgaacagttcatggggatacgctgctttttatataggcggaacatccgatataaaaatatccggaggcagcatcattggtgaaagagataaacacacatatacaccggccccgaggccgacccatgaatggggattcggaatttgcatcgaaggggcgtcaaatgtcgtcattgaaaacgtgagaatagccgattttacaggagacggaatcattatcagcaacggaggagaagggtatagaccgtcagagcgtattcaggtaaccaattgcgatatcaggcgctccagaagaaataacttgtccatcacagggtgcgacaatgttcttgtagaaggatgcgaaattgcagatgcgggaacaggaaacggaaccgctccttgctttggcattgatatagaaggctatagtgaaggaagcatcgtctatgaagaacccgtcaatgtcatcatcagaaacaacgtgttaaaaggcaatgtcaatcatgccgtttccaacttcaacggtacttctgtcatcatcgaaggcaatgttgcagacggtaccatttcatacggctatggaacggggacgacgattgcaaacaatatcatcaagaaaaatcccgaattcaccgggcagagcactggaattaacggcctcggtgtaggggctttggaagaaagaagcgatgccgtaataaagggaaatttgatttccggttttacgacaggcatagatatccgcggaaaaagcgtttttgctgcggggaataaaatccgtgattttgtaaatgccggaattcttgcttatcaagcgtcgcaagtcttcattgaaggaaattatattgaaaacgacgtacctgaacaaaggtccggcaccgctttcagcatcacgcaatcagacaatgtaacatgttccggcaatcatattgcaaatgtcgttcttgctgtcaggagcacagggaacgacgtccaaatcaagcataacgtcattaagcaattttccagaggcatatggatatctcaaggaaatgctgtaatagaaggaaactttatttcgccgaacggctttcaaacggtgccggagtcatatgctgtatccgtcacaaacacagcttcggcagttattcaacaaaacaccatcacacgcttcagaaactttccaatatactgctcgacaaatcagcatacaaaaattatcggaaactatattgaagattcaccgctgatcgtcacggtgtttctcacccgcggaacacacgaggttatcggcaatacgataacgctcagcaggccgtccttgccggctgtcctcatttatcttgaccaatcgtcggactcggcgatcctcaacaacacgcttcgaagcaatacggaagcaagagtaacggccattcaaaccaatacgtcaaggcaaacgctcatcatcggcaatacgattgtcaaaggaatgatccattcccaccaaacagatacagtcaatggaaatatcgaagtttaagctccctttggacagggagccttttatgtcctttttctctttttgcgaaagctttccgaggcttcgagaaaaatgataaacaaaaataaaaggatgatgatccactcgcccacttccaggatggcaaacgtcagggagtttacaatggctctttgcaaggtcatgccttgaaatacatccagcatgacggtaaaagcctctaaggaagctaataataaaagcccgattccgattaatttcaactttgcaccactctccgttccccgttattttttctcctttcataaagcactattcacccgggaatagtataaatgtgcttgcgcaaggaaaaatatgaaaaacgaaaaggggattctgacagccatgccattcttttttaaaggtcgtcatcaaaaagataacaaacaagaatctctaatgagcggagataagaacccggaaaccgtaaagttgtctgggtttgtgcgtcccttgcttgccgaaaacctgagcctgattaaagaaatgaccggaaacagctccgatattgtcatccgtaagttaaaaacgggcgctggcgaaaaaattgaaatagccgtcgtttatgtcggcggcattacagatgataaagcgattcacgattttttgctggaatcgatcatgaactccgaagaattggcgaaaaaggagtacggcagggaggttcttgagacgattgcaagtgatgccgttgccctgggcggtgtcgaaaaagaaaagcgattggacaaagtgctcgaatctttgatggcaggaaatacgatcattttggccgaggggacggcaaaagcggttattacgaccacgaaaggcggtgaaaaacgctcgatcaaggagcctgagaatcagcaggcattccgcggttcacgtgaaggatttatcgaatcgctcgacacgaatatttctttggtgcgcagaattattaaaaacccgaatctatgggttgaaaaaacgacgatgggaagcgtcacaaaaaccgatgtagcgatcatgtatatcaatggggtatgcgacccgaaaacggtgaaagaagtcaaaaaaaggatggaaagcattgagatcgacagcatccttgaatcgggttatattgaacagtttattgaagacgccgtatttacgacttttccgacggtatatcatactgaaaggccggatatggtcgcaggaaacctgcttgaaggaagaatcgccatttttgttgacggtacaccgtttgttctgcttgtccctgccgtttttattcaattttttcaatctgttgaagattactattcacgctttgacattgcgacgtttatccgctttttacgcgtattgatcttttttatttcgctgattgcgcctgccgtctatgtcggtgcgacgacgtttcaccaggaaatgatcccgacggagcttttgatcgtaattgccgcgcagcgtgaaatcgttccgttcccggctgtggtggaagccctgatcatggaaatttcgtttgaaattttgcgggaggctggaatccgccttccgaaagcgataggttcagccgtttcgattgtgggagcgatcgtcattgggcaggcggccgttcaggccgggattgtgtcgccggcgatggtcatcattgtagcgatcacagcgatttcaagttttgctacaccttctttcgccatggcgatttccgccaggctcgtccggtttttcttcatattagccgcggcgacgacgggtttttacggcattattcttggactgatcatcatgtttgtccatttatgcagcctgcgttccttcggtgttccgtatatgactccttttgcgccgtttattttgaaaaattggggcgacgccatcgttcgcttgcctttgtggacacatgagaagcggcctgaactgatcggcaacgacaataaggtgcgtcaaggagagtaccagaaacccgaaccgccggagtcaggcgatatgaagacaaaacaagaagatggtgatcaaaatgagacgaagcgttaagattgtactcctgcttgccgccactgtccttcttcaagggtgctgggataaaagagaactgacggatctgctgctgatcactgctgttggtattgataaaggaaaagatactgaatacgaattaagctttcaaatcgtcaacccggtcaatgtgacaggaggccttcaaggcggacagggaggagacaggccgccgatttcgagctattctgtgacgggaaacaatctgacggaaatgagcagacatgcgtcagcaaaaatgtcgcgcgagatttattactccaacaccaacttgttggttgttgacgaaaaactcgccaaggaagaaggcttgattaaaattcttgatgttcttgaccgggacaccgattttcgtacaacggcgacgattattatttcccgcggccaaaaagcgaaaacatttatccggacgctgactgcgatcgataagatcccgtcaaataaagtaaacaaaacgctgcaatttactgaaaagcatttaggagaaaatatgaaaacgagcgtccaggatgtcatcaaatgcttgacttcgaaggcaaagcacccgattatttcttcttttaaagtaaccggaaataaggaaaagggtgaaaaaatggaaaacgtgcagtctacatctcctgaggcaatagtcgaagcggacggcttggcggtcattaaagagggaaagctcgtcaattggcttgaaggcaaaacggcgagaggcgttttatggctgcgcaataaaatcagcagaacgtatttgacaattccaatgaatcatgagagagatgccgtcacatttgacgtcatccgccaaaaaacaaaaatcggatctcacctgaaaaacggcaaaccggcgatttcggttgacgtcgacatggaaggggacatcggcgaaacaactgtaccgattcacctggatgatccaaaagtgctgagcgacatcgaaaggaaggtggcaaaggaactgaaaaatgaattgcagaatacgattgacattgttaagcggaacaagacggatgttctgcaattcggtgatgttgtgtatcgcacccaccccgaagcgtggaaaaagatggagggcgagtggagcaatcggtattttcctgacacagatgtcgacattacggttaatgcatatgtacgaagaacaggtttaaggaacaacccgaacattttgaatcatcatgaagggcgttcttgaatgaaagagagaggagggctttaaatggagaaagcaaaaatcagtgctgcacagctgttcgtgctgattgttctgtttgaactcagcagctctctgctgatttttccagggcaatctgcagaacaggacgcctggatcgcgatcttgttcggaacagtcggagggctggctttgtttatgatgcaccactttttctaccaggtgaatcccgacgcctctccctataaaacgctgatgaatatttttggaaaaccggttggctggagcatgacatttatctacattgtttattattgttacattgcggcaagggttttgcgcgattttggagaaatgctgctgacatcggcttatccgaacacgccgattatcttcgctaatggattgttgattgcagtttgtatttttactgtgaggaagggaatcgaggtccttgcccgttcaggcgagctgttgtttggcatcatgttttggcttgctgtcacaggccttatcctgatagtttcgtcaggcttgatcaaaccgaaagagcttttgcccattcttggaaacggacccggtccgatgtttcatgccgtgttcacgcaaacgctgtattttccgtttggagaaattatcacctttacattgatcctgccgtatttaaaggaaaagaaactagcgaaaaaagccgggttgttgggaattgccatcagcggcctcatcctggcttttaatgtcgcattgaacatcagcgtgcttggcgtcgatctcaatatgcggtcgcgcttcccattgctgagtacgatccagacgattcaagtcgccgaattcttggtcaggcttgatgtatttttcatgctcgtgctggtgattggcggtttttttaagatgagcattttcatgtatgccgtaaccgaaggcgtgaccgttttattcaagcttaaaaacccctccaaagttgttcatgtcatcggcattattattttgattttgtccgtctccattgccagcaatatttcagagcatgttaaagaaggaatcgagtttgttccattatatgtccatttgccgatgcaggtgatccttcccgcttttatttgcatagtcacttatgtgaaaatgaaaaaaaataaaaaaaaggccatgtaatggattgaccccgcccttagggcaccctttaacatgacagacgaggtgaggtttgatgctctatacggtaaaagaagtggctcgcttggcgaatatcacgatcaaaacgctgtaccactatcataaaatcggccttctatgccccgcagaagtgacggatgccggctatcgcctttacggggtaaaagagctggaacggctgcagcacatcttgttttatcgggagctcgaatttccgctcaaggcaattaagcaaatactggacggcaaagctgatcgactgacgattttgtctgagcagaaacgtcttttcactgcccgtttggacagaattaaacagcttatttctacgatcgatctttcgattcagcaggccgggaaaggagaagcaatggatcaatcaagcatgttcaaagggttttcaagcagcagggaatgggaggatgcgctcgctgaacaaaaccgctatttgaaggaggcgtatgatgtcgatttgctgaaaggagaaccagtcatagcggaagaaatgaatgaaaaagctgaagaggcggcccgttttatgaatggaatggccgaagcgctcagagacggagtcaaacacgaccatgaacaagtgaagactgcaattaaacggcacctcaagtttttgggaattacgcccgacgattttcagtcccagacacgcttctttatcgaagacgattttcatcgcggaatgcttgaaaatcagcaaacaggcctctcgtattatttggctgctgctgcagaagcatttgcttcataataaaagaaggggaacggctcatgccgctccccttatcctgctgatatgcgttttttgacggtaaagccgccccttgaaagcgtgatgttgacatcggatacctttgcgatctgttcatcatgggtgaccatgatgacgcatttgttttcttggtgggcaaggttttgaaagagccggacgatgtcttttgatgtatcttcatccaagttgcctgtcggttcatcggcgacgattaaatccgtgtcacagcagaacgctctgatgatggagacacgctgctgctggccgccgcttaatgtcaatactttctgtctggcctgcttttcgccgatgccgaccttttcgagcatctccaaagcgtattgttccttgtttttgacctgagatccggtgatttccatggccgacgtgatattttggagagccgtcatatacggcagcaggttataggactgaaaaacgatcgatacatattgattgcggaagctggtcagtccgatttttgaaatgttttctcctttgtagaggatgttcccctcttttggcgcgtcaagtccgcccgccaacgataaaaaggtggttttgccggaaccggaagtcccgacaatcgtatataagagtccttggctgaattgaatgctgatatcctcgaatagaggctgatcctgatttttataccaatagccgacattctgaaattctaaaatactgcccataatcttcacttctttctattcttgttttgttaaaatcgttttcggatggagccttaaaacagatatggacggaaggagtgtcgcgaacatcgcaattaaaaggccgattccgccaagtgccattaagttcccgaaggatacttgaatgtcgagctgatcaatggctgagacttgagcagtactttgtccgaagaagcctccgccgcctgggcccatcattccgcctgcagactggctagctgacgtttgttcgatttgctggctcaagagctggttcccgatttgctttgcaatcaggctgccggttaatgctgagatcccgatggcaagcactgcgatcattaagatttcggttaaaaactgtccgatgagtttccggcgtttttcgccgatcgccatcagaacacccatttcgtattttctctccctgattgacatcatgacgatcagtccgagaatcaccgccccggcgaccgtgacaagatagacgacatttttcgagaaggaggcgacattttcaatcgggccgaccatctgctggtacaactggtcattggcgtccaatgtgaatgtatccaaatcaatgcctgttttcttggcagccgcaatgaaagcgtcgatgttggaggcgtcgtccatattgtagaccgcttcatctatcgcgttttgataatcgtcgccttttaaggccgatgccgccgtatatggtgtatagattttgttataagggtttaaaaaggcgaagttttgcgcttgattgtctccggatgaagtcgttttatagattccgacgatttttaaattgatcgttgcatcttcatcgctgctcgctttgactttgatcgtatcgccgaccttcagctcgttttcttcggcaagcgtttcttcaatcacggcgactttttcattcacatcatcctttgttaaagcacggccttccgtgatcttggacgtcccgtcggcaaattcgtcgacgagggctgtgcttgtcacaccttcgattgatacgtcagcctgcatcatttgccggccgccctgttcattgccgcccgatccggccggctgatcgctgtttgagtccgttgaatcctcgtcaccgctttcgatcggatcgaagttgtccgctaaagcagatgttgaggagatgaagttatagcttttgacatggtaaaggctcgcaagtttctcggctgatttgagagaaacgggggtcgattcaaaccttttccggtctcctgagtcctgctgttctttcatcattttttccctgtcaactttgagcgtgacgctgcctccgagctgttccctcgccagttcgctcgatttcacggctgccgactggatcgtaattcctgtcagcacgagcacgcaaatcatcgtgaaaacaaacaattgtaaaagtgtttttccttttttcgctttcatgctccaaaaggctcgtttgaaaaaattcataacgcgtgattcctccgtatctatttcatttattattgctgccaaatctaacggcagcaggacttttgccttatgcttgatttcatcttagccgctacttatgaataaattatgaccaaactgttgccagacctttaaatgttcagaatggaattgagaaatggctgggccctatgtaaaatgaatctaacgtttgtctagcggaggcacttttacgatgaaaatattaatgattgaagataatttaagcgtatgtactatgacagagatgttttttgcaaaagaaggatttgaaacagagttcgtccatgacggactcgaaggatataaccgttttaaatcaggtgattgggatttgctgatcatcgatatcatgctgccgtcgatggatggggtcacgatctgcaaaaaggtcagagaagagagcacggttccgattattatgctgacggcaaaggatacggaatcagaccaggtgctcggttttgagctcggggctgatgattatgtgaccaagccgttcagccctttggcgcttgtggcgagaatcaaagcggtgagccggagatatcaaaacgccggccggcaggattccgctgacagcgacacgcttgaaacggaacattttaaaatcaataaaaaaacgagagaagtgtttttggacggcgttcaaattcaaaatttgacgcctaaggagttcgatttattgtattacttggtgcaaagcccgaaacaggttttttcaagggagcagctgcttgagcaggtttggggataccaattctacggagacgagcggactgtggatgttcatattaaacggctgagaaaaaagcttggcagcgactcgcggccgtttctttacaccgtatggggagtagggtacaagttcgatgaagattaagtatctctatcagctgctggccagtcacatcagtatattagtcttggcttttctcatcacgggggcgctgttttcacactttgccaaagactttgcatacgagagcaaagtcgatgagctgtcttcctacggctaccgcatcatgggcgaaatggagatgcggccgaaaggagcgccggccattatgaagccgtttgaggaaattttgcgaagcaggaagatcagcttttttctgtttaatgaaaagaaagagatcttgatgacgccggccgatttgcggccgcgaaaactgctgctcagtgatgaagaatggaaagagcttaaagatggaaaggccgttgtcgtcaaaaccgactttaaccgttttaatgaggaagtatcggtcgtcgctctgcccaacatcgtcaacaatgaatttcagggaggcattctgctgaccgctccgatcagcgggaccgaagaaatgatcagcgacatgaaccgctttatgctctttacggcggcgggtgtcatcttagtcgctattctcttaagctggctgacgtcgaaattccatgtcgcccgcattcagaagctccgcgacgccacgaaaaaagtcgcggccggggattatgacatccatatcgaaaaccgcaataaggatgaaatcggtgatttgggcgacgactttaacattatggcccgcaagctaaaaagctcaagcgaggaaatcgaccggctcgaaaagcggagaaggcagtttatcactgacgtttcacatgagctgaagacgccgctgacgacgatcagcggtttagtggaagggatgaacagccagacgatacccgaagaccagcaggataaatgtatgaagctgatcacggaggagacaaaaaggctgattcgcctcgtcaacgaaaaccttgattatgaaaaaatccgctccaaccagattacattgcaaaagctgcattatccgctgatcgaagtgtttgaaatcattaaagagcagctggcgcttcaggcggaggagagacagaatcagctgatcctcgatgtggaagatcatgtaatggtcaatgccgattacgaccggctcatccagattctcgtcaatattacgaagaacagcattcaattcacaacgaacggaaccgtttggctgagaggccgggaagactacaaggagacggtgatcgaagtagaggataccggaatcggcattgatgaaaatgatatcgaaaacatttgggatcgtttttataaagcggatttatcacggacaaacacaccttacggagaatacgggctggggctgtcgatcgtcagacagctcgtctcccttcacaacggcacggtagagattgaaagcgagaaaaacaaaggaacaaaatttatcatccgcctgccgctgacggcgagagatgatgatgaatagaaacccgccagacagcgtctggcgggtttttgttaatctttaattttgaatttctgaatcaggtgctgcagctcttcggcgttttgcgcgaggatctgtgatgcggcggcgatttcttccattgaagcaagctgctcctgggttgccgcactaaccgtttgcgtgcttcccgctgcagtctcggctacttctttgacgccggaaatcgcggtttcgatttcgcttgtgccggctgtcaggtttttcaccaagtttgtcacatcattgatctgtgtgacaacctcagttatcgagttttcgattttttggaaagcgcctccggcttcatgaacgacgacaagtccttctttgacttcgccggttgccgaaatgaccgagttcatcgtctgctttgtatcgttttgaatgatcgtaatcaaccttgtaatctgttctgctgactgggccgattgctcggctaattttctgacttcatccgcgacgacggcaaagccttttccttgttctccagccctggccgcttcaatggccgcgtttaaagctagcaggttcgtttgttcagcgatgctcgtaatcacttcggtaatattcccgatctcatttgaacgttctgttaaatgtttaaatgcttctgaaagagaaacgaccgtttcattaatagactgcatttgtgcgctcactttatcaatggctttcgtgccttcaagcgacatcttcgccgtctggtctgcggtggcggctgccttttcggcgctagaagaaattcttccggcaaactcggtcattcccttaataacggttctgctgttttcaacgctttccacctgctgatcagagcctaccgcaagctcctggatcgtcgttgagatgtactcgctcgcctttgtgctttcatcagcgctggcgctcaattcttgtgatgatgaagcaacttggtgggacgtttcgccgaccgtttcaatgatcgaacggacgcctgctaccattttgttaaacgatgcggtcagcaatcccaattcatccttcgattgatatgttcctttgacagtaaaatcgccttgctctgtttcgcgaacagcgcctgaatgtctttgatcggctttgtgatcagccttgtcattaagagtccgatcgagatggataaaacaagcgatgctgcgatcacaatgatgagaagcgtgatgatggaaccggcttctttagaatcccgctgatagatcgttttggcgttgtcagcatttagcgtttgaatgtcttcaatcagctggttgaccgtttctctttgaggctccatctcttttagatagacatcataagctttgtcattttcgttcttcaccgccaagctgagcatctcgctgctgatatcttgcaatttcttgtattcgcttttgaagctctcgtatttttcagagacgttgtccattaatttcagctgatcgatcttttccattaaggtgttgttttcttcgtttttttccttgatgtttttttgcaaagtatcatttcgatcgttgtctttcgtcaccattaactcgaatttgtacgtatcaagatcgaggttgttcgcttttaatcttgcaaacaactggttgggaatcaattgatcttgatagatcatctcggaacctttggaaagcttgctcagtccgcctaccccctggatgccgacaattgacaaagccagcgccgaaatgataatgatgacaaacagtttgcttctgatttttatatttctcaacagattcatatggtgttctcccatcaatttatttactttacatatcggctttcaaaacggttttgtgaatcaatttatggcaggtattttaagggaaggggatattttctgacaacaaaaaaaccccataaaaaaggggtttttttaaacgagaacttttgcgaaaaactcctggtataatgcgcggaccgcttgtttttcctgagcttccttaacgccgaacatcatgctgacttccgaggagccctggttgatcatttcgatgttgacgccggcttcagacaatgcttttgacgctcttgccgtcgttccgacgttatggcgcatggcttcgccgacgaccatgatcagggcaatattgtgttcaatcgctacttcatcagcatccaactcttccttgatccgtttgatcatccgtttttctgctgcttgatccatttgattctgccttaaaatgatcgtaatatcgtcaatgccggacggaatgtgttcatacgtcagctcttcatcttcaaggatttgcaggacgcggcggccgaagccgatttctcggttcatcaaatatttgctgatgtaaatgctgcaaaatccgctgtcgccggcgatcccgacgacaggtccgttcgtgttgtcgcgtgtggcgacaactcttgtcccttccgcgtccgggttgtttgtatttttgatctgaaccggtatgcgcgcccggaaagcaggaatcaatgcttcatcatgaaagacggaaaagccggcatacgacagctctctcatttcccggtatgtcagctcgcggatttctttcgggttggatacgatcgccgggttgacagaataaacggcgtcaacgtcagtgaagttttcatacaactcggctttcaatccattcgctaaaatggagcccgtaatgtcagagccgctgcgcgaaaacgtcatcacttctccttcctggctgaatccgaagaagccgggaaagataatgatgcccttttgctgtctcagctgaaacagattgtcgtaggactcgggcagcacttgtgcgttgccgggttcgctcgtcacgaacagcccggcgtcttttggactgacataatgtgcttcaactccccggtgcctgaagtaggccgctaccagtttggcattgttatcttcgccgcttgctttgatcgcatcaataaaccgttccggatttgttttatcaccttcgagcagctgaaggaggtctgcccggatccggttgatcacgtcatcggcaagcccgagctctagcgcgatatcggcataccgtccgacaatcgcctcaaccaggccggttgcttctttcgataataagtactgttgggcgcattcgattaacaggtcagttactttcgtatcctcgggatgccgttttccgggtgccgatacgacgacggccctcctttccggatcggaagtgacgatttgaaatactttctctagctgggctcctgatgcgagcgagctgcctccaaatttaacgactttcatttgttacatctcctaaagtttaaattttcgaaataaatttaattttaattattgcgctttttacaagaagaatcaaggtttttctttcaggaaagaacaaatgtgtttttgaggaggactcatcatagggaaatcgcatgacttcaacctttgtatctattaatcttattgactatgtcagaaaaaatggtaagatatataaaggcccttattgataatgataatcattaacgtcggcggaggggttgctttgttgtgcaaggaggctactgcagcatgaaattacgatacctattgctaatgctcatcattctttcattcagctcgatattcatcggcgttaaggagctttcgcctcttgaccttttccgctttaatgaggacgaaattcaaacgctttacataagcagaatcccgcgcttgatcagcatcgtgcttgcgggaatgagcttgagcatctgcgggctgatcatgcagcagctgacgcgcaataaatttgtttcaccaaccaccgctggaacgatggattgggctcggctcggcgtgatcattgcgatcgtgcttttttcgtctgcagggatagtagtcaaaatactgtttgcctttgtttttgcactgtttggcagctttttgttcgtcaaaattttggacagaatcaagttcaaagatgcgattttcatccctctcgtcggaatgatgctcgggagcgttgtcagcgccatctctactttcatggcttatcagtacaatattattcaaaacgtcaatgcatggtttgaagggaatttttcgctggtcatgaaggggaggtatgagctcttatttctgagtataccgctcgttatcattgcctatctgttcgccaataaattcacgttggccgggatgggggagtcattttccatcaatcttggtttgaaatacaagcgggtggtcaatatcgggctgatcatcgtatctattatttcgtccgtcgtcatcctgacgatcggcacgcttccctttttgggattgatcatcccgaacatcgtgtccatttacaggggagatcatttgaaaaacagcctgcctcacacggcggttctcggagccgttttcgtcttgttttgcgatatagcgggacgtctcgtcatttacccgtacgaaatttcggttggtttgatggtcggcatcatcgggagcggcgtttttctttacttgcttttaaggagaaaagcctatgcgtcataaacagaaaatgcttgtactcatcgtgatagcagcagtctgcatcgggctgtttctgttctacggtttgccgtctgtatgggaatatgcgcttccgcggaggtttgccaaggtttttgcgatcatcattgtcggtacagcgattgcgtattcgtcgatgattttccaaacgatcacaaacaacagaattttgacgccgagcatcctcggactcgattctctctatgttctgctgcaaaccgggattattttctttttcggtgcagccaaactggctgacctcggcaaaaacggcaattttctattgtctaccggtttgatggtctgcttttcatttgtgctgtttttcctgatgttccgccgcgggggaaggcacatcttcctgctgctgctcgttggaatcgtgttcggcacattgttcagaagcctgtcatcctttatgcagatgctgatcgatccgaacgagttccaagtcgttcaaaacaagatgtttgccagcttcaacaatttgaatacggacattttagtgcttgcttcgctcgtcattctggcgattctcgtttacgcttggcggtttaatccgtactttgacgtgatttcgctcggcagggatcaagccgtcaacctcggaatcgattacgaccggacggtgaagaaaatgctgatcgtcgtcgccgttctcgtttccgtgtctactgccctcgtgggtccgatcacatttttggggcttctcgtcgtcaatgtggcccgggaggtatttaaaacgtataagcacagcgtcctgattcccggagcggttttgttcagcatcattgcgcttgtcggaggccagttcattgttgaaaagctgtttggtttaacggtgacgctcgtggtgatcattgattttatcggcgggatttattttatttacctgttgctgaaggagcgtaaataatgatagaagtacgagatatcatgaaacaattcggagagcagaccgttgttcatcccacgactttaacgatacaaaaaggaatgatcacgtccttcatcggaccgaacggagcgggaaaaagcacgcttttgtccatcatcagcaggctgatcggcatggacgccggaaaagtgctgattgacggcaaagaaatcggcgcttacaaaagcaatgatttagcaaaaaaaatcagcattttaaagcagtccaaccagatcaacatcaggctgactgtcagggagctcgtcagcttcggcaggtttccttattcacagggaaggctctcgaaagaggactgggcatatgtcgatgaagcgattgattacatgaagctgagagacattgagcataaacaccttgatcagttaagcggcggccagtgccagcgcgctttcatcgcgatggtcattgctcaggataccgactatatattgcttgacgaaccattgaataatctcgatatgaaacactcagtagagattatgaagctcttgaaagaccttgtcgaaaatcgcggaaaaacgatcgttattgtcattcatgacattaatttcgcctcggtttattccgacagaatcgcagccctgaaaaacgggcggattgtaaaagaggggccggcggaagacattatccaaacgccggtgctgaaagacatctatgatatggacattccgatccaacaaatcggagatcaaaaaatctgtgtatattttaaatgatgaggtgacctgaattgaaaaaactatctttattgattatggcattgataaccgttcttgtcgtagccgcctgcggaaacaaagctgctgacacagatgcaaaatcttcctctaaaaaagaaaccgtcacaattaaacacaacagcgacacaacagatgtaccgaaaaacccgaaaaaagtcgttgtcttcaattttggaatgcttgacacgcttgatgagcttggcttaagcgaccgcgttgtcggccttccgaaacaaacccttccgtcttacttgaaaaaatataaagacagcaaatttgaaagcgtcggcggactaaaagagccagattttgaaaaaattgctgagcttgagcctgatttgatcatcatcgaaggcagacagtctgaacagtatgacgagtttaaaaagatcgctccgacgatcgacattgagcttgaccagaagaactacatgaacagttttaaagaaaataccgaaaacattggaaaaatcttcggcaaagaagatgctgtcaaagaagctcttgcgaaaatcgatgaaaaagtagagaaagccaacaagctggcgaaagaaaaaggcggcaaaggattggtcgtcttaacgagcgataagcaaatcagcgcgtatggaagcggctcaagattcggcttgatccacgatgtgctcggcgttgaacctgtcgataaaaacatcgaggtttcccttcacggccaaagcgtctcttcagaatatatctctgaaaagaatcctgattacctgtttgtcatcgaccgaagcgctgccatcggcgaaaaaggaacagcaaaagaagtcatcgaaaatgaaattgtaaaatcaacaaaggcctataaaaacggccatatcacataccttgatccaggctactggtacctgtcaggcggaggccttgaatccgtatctgaaatggtgaaagaagtcgaaaatggattgaaataaaagagcgaggctgccggttcttatccggcagccttttttgtctgttcaaggagaagagggcagagagaagcaaagcgggttttcatgctcataacgccgcaagggccccagactcagttaagcgaatataaaaaaacacgccagttcgattgaactggcgtgacatgatcagcgggccggctggccttgtttgtcggcctgcggcttctttttcaatgtaaacgaaaggataaatccgatcagcgccaagacagcggccacgataaaggcggaattcatgccgtgaatgagcgcatttaacggatgagatgtcgcggcgtttttggctgaattactcatgacggaaatcagaacagccgtgccgatcgaaccgccgatctggcgcatcgtattgttcatcgctgttccgtgcggaatgaggtgcgccggaagggcattgatgcccgccgttgtgagaggcatcataatcatggaagttcccatcatccgcagcgtataaatgacgataataaatgtcagcgaagtatccatttgcaggtccgcaaacgggatggacgtcagcagcaagacggcaaacccgataatcgcaaggccttttccgccgatcttgtcaaaaatccggccgatgatcggcgacatgatgcccattgctatcgcgcccggcagaagcatcaaacccgaatcgaaagctgtcacgtctctgacgttttgcgtgtacagcggcaaaatggtctcagtaccgatcattaatgcaaaaacgatcataccaagtagcgttgttatcgtaaaagtccacgattggaaaacgcgaaactcgagtatcggccttttgattttcaattgtctagagataaagaagaacagggcgaccgcaccgactgcaaaggaaattaaaacagtattgctcccccagccttctgatccggcgttgctgaagccgtacaataaaccgccgaaacccaggctggacaggataatagatatgatgtccactgatgtttctctcaatttcgtgacgtttttcatcagcaagatgacaagcacaagatcaatcagtgcaattggcagaataatataaaataagtatctccatgtaaagctgtcgacgatccagcctgacaatgtcggtccgatggccggtgcaaatgcgatcaccaagccgaccatgcccattgcagccccgcgtttttcaaccgggaaaatcgttaaaaagatcgtctgcatgagcggcatcataattccggcgcctgcggcctgaatgatccgcgccgccagaagaaccggaaagttaggcgccaccgcaccgacgactgttcccgccgcaaagatgctcatcgccgcgatgacgagcgcgcggctcgagaatttttcgatcaaaaaggcggtaatcggaatgagaatcccgtttgtcagcatgaacgccgttgtcagccattgagcttttgtagcgtctatgttcaagtctgccataatatgcggcagtgcggtaaccaggagcgtttggttcaagatcgcgataaacgccccggcaataagcaaacctacgatgatatttctgttgtatgtctgttgttcagttcctgtactcatatcaatccctcttattcttttatactaatcgtttgtatttgtgaaacatcgtattggatggcctcgatttttccaaggtaatcaaggagagccttaattaaatacgtgcggggctctttgctgaaaagctcttcgctcagcaaatctgccgctgacagcagttctgtcacggcaaagtcgtcttgtgacagcgaagaaatcttggttttcagtttttgcaaaaggtcttcaagcaattcctcttttttgggcggtgcccagcatgatgagaaattcgaataggaggcaataatgtcttcatttaatgaacttttctgatcttcgttcagctttttctctatgaagaggtccagaactgacataatgaatggcggaatcgttttaacgtcaggctgcgcttttccagtgccgactaaaaacaggaattccctcatcagcccgtggaaaatgatgacgatatcccatataaacggctcgacctcttcgccgtacgcttgaatgatagagtctttatgccagctgataatcattgattttgtttctttcagatgctttttaaatactgcggtatccggagatgatccctcattggagatgaaattgataaattggcggttttcactgaattccgtaatctccaaagcgatttttttagcgaatctttctttcggcgtcagcgaggtttccgtattgatgacggcgcttttgttcagcatttcatgctttctgaacttgatcaatgccagcagaagatcttctttagattgaaacagtttataaatagatgcttttgacattttgcattcttcagcgatcgcttgcattgcaacattgtgatagcctttttgggcaaacagctttttggcggcccttaagactgctgcttttttttcgttcattccggctccttctttcgcaatgataaaactcatgggtcactaaaaaacccatgagttttcataaatgaaatattaacagaccgaacagtttcggtcaacgattttgttttgggtcacgatgaaggctgatccaatcagccgcttctccgtatgaaagcacgccgtccgtcatacgattgaaggcgccgcggcggatgatgtcttcaccgatctttttcaccagtgacagtgcagctctgaaaggggcggatccgcagctgatcctttcaatccccagttcggaaagaatctgtaaagagggggtgtgtgagccggccagcacgttgatcggcccggatataccttttctcagcccggcaatggtgcctgcatcatcggctccggggataaaaatgcagtccgcgcctgcttgactgtaccgatttgcccgccggactgctgcttgaagacgggagccgggggcgtcagcattgagccagtacacatccgtacgggcattgattaaaacaggaaggttcagttttttaacagccgttattttttcttccattaatgtttcatcacacagcggccgacagggttctttcgttccgtcttcaatattaataccgacaaccccggcagctgcggctttttttgcgttttcagcgactgtttccggtgtttggccgtaacccgcttcaagatctgcactgacgggaatatcgacggcatccgtgatggttttcagtacggaaagcaatgtttcaaaggggagatgttcgccgtcgggatagccgagggacatggcaattccggcgctggttgtcccgactgctttaaaaccgcagttttgaaatgctttggcgctggctgcatcccatgcatttggcagaacgaatgggtctgactgatgatggagatccagaaatgtttgatactttgcaaatgatttcatgtattccactccttttttacatagtgtaaatgtaaagaccttcgatgctcatcgaaatgtggaatggaacgcatggaaaaaggctatcgatcaccgatagcctaaagcatctattcgagtttaaatccttgtttctcaagcatttcacggatgtgaggatagtacactttattgtaataagcggatatgccctgagaccagtttcttgtttcctgtccgttagtccgttttgtcatgtattcggatatttcttcatcgtacgcgtcgatcagcggttttaaatccggttgatacgtttcgctgtgccttaccgcttgttccgggaggcgcggctttttggcggagcggtccgccggatggccgacgacaagtcctgcgacagggaagacgtattcaggaatattgagcagtttgatcaactcttctgcacggccgcggaccgcgccgatcggcacagtgccaagtcccatcgattcagcggctgctgtggccgtcccgagggcgatgcctgcgtcgacagctccgacaagcacggattccattccgtctgtgatcgcaagcgtttcgccgtttttctcaagggcgattttcgcacggttgaagtccgcgcagaacaaaaggaaaacaggggcctgctcgatccagacctgtccgccggccagttcggcaattttctttttccgttcctcatcctgaaccgtaatcacggtgacctgctggccgttaatggaattcggcgcggcttgaacggcttgaataatgtcgtccagctgttcagggctcacgggctcatctgtatagctgcggattgatctatggtctttcaatgttttcaatacttcattcattagaaactcatcctttctttaatccgttgtgtgcgttttaaccacattcaggggttctgataaaaggtcgcccgcggcttgaacgaaagcttgaaaatgctctgtctgattatgggcgtcaagcgcgtcttgatccttccattgctcaagcatgacaaatgtattggcatgttcggtatcttcaaacagctggtactgggcattgccggcttcagctcttgaatgtttaagaagcggttgtacgctttcgagaaaggcgtctcgtttttctggttttactttcatataggcttgcaatacgatcattggatcaaacctccattatgtcatttagaattccttttcgtgtgcgttgtatacacagggaattgattgttcgaaaatcttcgaacaattgaatcgtaacatgtccttgcattgccggcaacccatttgcctccttgatgaattgtcttgaagttaggattatgatacatttaacccatgaaaacaaatgaaatgaagttaacagccgttctccaagccttgagtgatccttacaggcttgagattgtcaaagcattggctgacacagccgagaaaacgtgcggtacgtgcacaaatctcaatattgcaaagtctacgctgtcccaccacttcaaggtgctgagggaagcgggtctgctcaaagtccgcatcgaagggaagcatcattattactccctctgcaaacgggaattggaggagcagtttccgggactgatcgaggcggttctcaaggtagaaaaggaacggtggtaaacggaccagatgtcggctttttaaagccaggctgataccggcaggaaagaacctgccggtatttttaaagcttctcatcaccgcataccgcttcataaagcttggcagtcccttcgtcgatctgatcggcagcgattttggcgaatccgagcacgagcgataccgttccttcatgttttgtctgctctttctttaacgtaaaccgactcatgccgtaaacctcgacccgcctttcctttgctcttaataaaacctcttcttcacttctatccgtttcaaaatcggccacaaagtgaaggcctgcgctctcgcctttaattttgacccggccgttaaagtgtttgacaaggcttccgatcagccttgtccgctttttttcgtaaatctggttcattttcttaatgtgcttttggtactcccccgattcgatcagttcctgcagggcgagctgcgttaagacgctgctcgattgaatcgagaaatggtgcctttttctgtatcgcttcagcagcttttgcggcagtaccatatagctgattctcaggcccggaagaagcgattttgaaaaagtgccgatgtagatgactttttcagagcggtcaaggctttgcagggcggggatcgtatcgctcccgtatttaaattcgctgtcataatcatcttccacaatatagcggtttgccccgtcggaaacccagtttaaaagctgaatcctcctcgataccggcataatgattcctgttggaaactggtgtgaaggcgtgacaaataaaacgtccggattcagacggtgaatctcgctgatccgcattcctttatggtcgagctgaatcgtggcgacttcttttccttcatttttcagcagtcgataaatgcggctgtatcccggctcctccatcgcatagacggctgaggcggggagaaggtcctggagcgtgtgaattaaggactgcgtccctgcgctgatcacgatttgttcggggagacatttgacgcctctcgttaaagcgataaagcgtgcgatcgtttggcgcacttcgtagacgccttgcgggtgcgtcatttctccgagttcgtcaacatgtgaagaaaccgctttctgttcgcagcgaagccatgttttaaacggaaaatgcgccgtatcgacgctcatatgggaaaacgagatccagccgtctttgctttcaggctcttcaaccagttctttttccaattgaaggggaccggggtgacggctggcgtggaacgtttcgatctgctctacaaaaaagccttttctttcacgcgaataaagataaccttctgccaaaagctgctggtaggcggcgttgaccgaattgatgctgacgttcaatgtttcggcgagctctcgcttggatgggagctttttccccggcaaaaggttgcggctgaaaatttcttctttaatccgttgatagatttggtgataaatatattccgcgcccttggagcggtcaatcggtattgtgatcatagcgcctccctctggtaccatcaaaaattaatgattggtacttttcatcataccaaaaaatattcagaattataagaaataaaagtgggggagagattttttatgagtcggaacacaaaagcattcacaacggaagattggcaggccaaacgggatcaattcgtggcaaggggtgtctccaacggaaatcgtcatctggccgctaaaggggaaggtgccgttttatatgatattgacggacgccgttttatcgattttgccggggcgatcggcacattaaatgtcgggcattcacatccgaaagttgtagaagctgtcaagcggcaggccgaacagctcatccatcccggttttaacgtcatgatgtatccggcctatttggaattggcggaaaagctttgccggcttgcgccgggcgcccatgagaaaaaagcgattttcctgaactcgggtgcggaagccgtagaaaacgccgtgaaaatcgccagaaaatatacgaagcgtcaagccgtcgtttcttttacccgcggattccacggacgcacaaacatgacgatgagcatgacgagcaaggtgaaaccgtacaaattcggattcggtccttttgcacccgaggtatatcaggcgccgtttccttactactatagaaagcctgaagggatgactgatgaaagctatgatgacatggttattcaggcgtttgacgatttcttcgtctcgtctgttgctccggagacggttgcttgcgtcgtcatggagccggtacagggagaaggcggttttatcattccttcaaaacggtttgtgcagcatgtcgcagccttctgccaaaaacacggcatcgtttttgtcgctgatgagattcaaacaggctttgccagaacgggcaaatattttgcgattgagcattttgatgtcgttcctgatcttgtgacagtgtcaaaatcgctggctgccggcgttccgctcagcggcgtcatcggccgggcggaaatgctcgatgcggcggatccgggtgaactcgggggcacctacgccggaagtccgcttggatgcgtagccgctttggcagtgctcgatattatcgaatcggaacagctcaacaagcgctctgaagaaatcggcaaagccatcgaagagcgggcgcttgaatggaagatgaaatatccgcagattggggaagtccgccgacttggcgcaatggctgcgattgaaattgtcagggacgaaaagacgcgggagccggacaaagcagctgcggccaagattgccaagtacgccaatgaacacggtctgctcttgttgacggcagggatcaacggcaacattatccgttttctgtctccgctcgtcattactgatgaattacttgaggaagggttcggcatcattgaagaagcgctggaacagctctagtttgacatcttctaaaagaaggagcggattttgatgggtaaacagcaaatgaaaaaaacgatgtcgcagacggatgtgctatttttagcgatcggagctatgctcggctggggctgggtcgtcctttccggcgactggatttcgacagccggctttttgggcagcacgatcgcgtttatcatcggcggcatactcgtcatcttaatcgggttaacgtacgcggagctgtcttctgccatccctgaaacgggtggcggcttgattttcgtctacagggcgttcggacgaaaaacggcttttgtcgccgcttggggtgtgctgttcggctatgtttcggtgattacatttgaggcggtcgcattgcctaccgtcatcgattacgtcctgcctgtcgaacatcaggggtttctctggtcgctaagcggctgggacgtgtatgtcacttgggtgttgatcggttcgggaggtgcggtcgtcctgacagcgctcaattacttcggcgtcaagccggccgcgatttttcagtcggtctttacgattgcgattatcgccacgggctttctccttttgggcggcgccttggtaaacggtgatttcgaacatgtacagcccctttttaaagacgggttttccggtatgatgtccgtccttgtcatgattccgtttctatttgtcggatttgacgtcatccctcaggttgcggctgaaattaatgccccgaaaaaaatcatcggcaaaattttgattatttcgattatcagtgcggtcgtgttttatttgctgattgtattcggcgtaacgatgggtctgtcagaaagcgagcttgcgacgacttctttggcaaccgcggatgcaatggtcaatctgctcgggaaccagctgttcggcacggtgcttgtcctcggcggcgtcgccggaatcattacgagctggaacgcatttatcatcggcgcgagccggattctgtttgcaatgtcggaaaagggcatggtgccgaaatggttcggcttcatccatccgaagtataaaacgccgactaatgcaattttatttctgggtgcgctggcgttttttgccccgctgctcggacgccctgcccttgtttggatcgtcaatgcagggggaacaggtattatagtcggatatttgatcgtctcgattgcattcatgaagctgagaaaaacagagccggatttacacaggccgtataaaatcaataagtggaaaacaacgggtatatctgctatcctcttaagtgttatcttccttgccttttatttgccaggcatgccggccgcgctcacatggccgtatgagtggctgatcttggcgggatggacattgatcggttttcttttatacaacagcagttcaaaacgtaaaggggaggagattcaacatgaccagcatgctagaagtatataatcctgcgactggagaaaaaatcaaatcggttccccagcaatccgcaaaggaagtcgaagaagctgtcgtacgctcgcatgaggcatttcaaaaatggtcgaaaacatcggctgcagaacgagcgggcttgctgaaaaaatggtttgatttaattgtggagcagaaggacgagctggcaaaattgattacgcttgaaaacggcaagccgtacgctgaagcgcagggcgaagtcttatatagcgcaggctatatcgaatggtatgcggaggaagcgaagcgcatctacggaagaacggttcccgcctctgtgacgaacaagcgcatcatcgtcacacgccagggagtcggacctgttgcggcgattaccccgtggaattttccggcggcgatgatcacgagaaaagcggcgccggctttggcggcgggctgtacctttatcatcaagccggcgcctgatacgcctttaacggcgcttgagctcgtccgtctcgggcacgaagcgggcattccgaaagacgtccttcaatgtgtgatcggcgacggacaagagatcggctctatttttacaagccatccgctgatccgcaagattacgttcaccgggtcaacacctgtcggcaaacatttaatgaaaaacagcgccgagacggtgaagcatgtgtcaatggagctcggcggccatgccccgctgatcgttgatgaagatgccaacattgacctcgccgttaagcagacgatgctttcgaaatacaggaatgccggacaaacgtgcgtctgtgcaaaccgtctgatcgttcatgaatcggttaaggatgaatttgcagaaaaactccgcgcggaagtcgccaagctgaaagtcgggaacggactcgaagaaggtgtatcaatcgggccgatcatcaataaaaacggcttccaaaaaatcgtcgatcaaatcaatgacgcggtgaataaaggggcgaaagttctcatcggcgccgaatacgaaagcgatgatgagaaatcatgctactttgtccatccgacagtgctgacggatgttgatccttcaatgacgatcatgcatgaggaaacattcggccccgttgcgccgattacgtcttttaaaacgctggacgaagcggtcaagctcgccaatgatacgccttacggtttagcggcatacttctttacggaaaactaccgccgcggcatctatttatccgaaaaccttgattacggcattctcggctggaatgacggcggaccgtcaaccgttcaggcgcctttcggcggcatgaaggaaagcggtatcggacgcgaaggcggactggaaggcatcgagccgtatttggaaacaaaatatttgtccatcggtttggatgaataacaagacaacatgaaaacccgcccgtatatccccgggcgggttttttttacgctttcatctgttcagcgtttattttatcttttttgggctgataggaaatataaaaaatgcctaaaagaagcagggcgatcccggcccaggaaacaagaggcagcgattccctgacaagcacggttcccaacagcgacgctgtaagcggttcagcaagcgacagcgtcaccgccgttgaggcgggcacttttgccaatcctgtcgtaaataacaggtacgcggctccggttgcaatgaccccgatatagaggctgacagccattccctgaaccgatgagatccagccgagatcgtacagaaacaacaacggggcaagcaatacagcgcttaaaaagaatacggtgcctgtgacagcctccggcttttgcttttgcaggagtttcttgcttgtcagcgtgtagacggcaaaggaaagaccggcgccaagtgcgagcagtatgccgagaaagctcccccccgatgaggcggagggaatgaataataaggctacgcctgctatcgctgcagcagttgcgatccaccatttcgtctgcggaacctttttgaacaccagccattcgaggcagccggcaataatcggagcgctgccgatggcgacgaccgttccgacggcgattcctgacaggctgacggctgaaaaaaagaaaggctggtaaaatgccatgctcaatgctgcgatgatcagcgttttaacgggccagccgcttcgtttcaattgaccgcggaaagccgcgaacaagagcagggtgatgccgccgacagccattctgacagcgccgaacacaagaggtgccgcctctttcggcgcaaatgcctgggttgttcccgtcgttccccataaaattgccgcaagcaagacaaacagaaccgatactttcatactaacgatctctccctactcgatcattcagaactttttctattgtaagataagtttgcggatttttgaatcgccgcttcggaaatttccctgaaaagaggaaatattcaacgctggccgaattcatataatggccaaaaaacaattaaagttggaggaagcggatgaaaaaacgaacagttttattcttcttgttgatctggctcgccggatgtgcgagcgcccaagaggctgaggaacaaaccaaatgggtgaacagcgaacagaaagcgattgagaacggcattcgttatgaaagcattacaaaagacgatattatagacaaaatcgatttaaacggtgaacaagtcgtcgtttttcgattcggcgattcggagggagaggggattggcctcgcacacatcaaaagggaaaacggcaactatcaatggtaccgcgacttaaattacgcaattgtaaaatcggaccacccgaaaacggagaatgcggaagcttccgcgccgttcacaacccctaagggaagaaagtacacgttatatacaggggatgcagatcgcctgaatggtacatttgagactgatgacgggcttcatttggagccggtggtcgatcaaaaaacgggcatgtattatcagatcgtgcaggattcggactgaaatgaaacaaaaatgctgtcgggttgttcccgacagcatttcattttttacgatttctttttccgcactgtcaagagcagcgcagcacctccaagaagcacggcgaggatcgacaggatcagggaagcggtttgaatcccttgtcctccttgactgtcttcattttctgcggcagcgttttgtttcgttgaagcgccgtgtgcatcaaccgtttcgtgtccgagttttgcagcgtcgacaatgcttgtgattgcatgcggggtatcggcgtcatcatcaccggtccactcgacaattgtgccgtccttataatattggtatgcgttccaggcggccttttgttctttgtcagggtttttggcggtgaaggtaaactgctggaattcaccaggctgaatgccgccgttttcggcttcccacgtcacccttgttactttttcgtttttgccggtttcagtgcttgttttccaccccggcaccggttcatactgctgaaattcaacaccgtccggcatgctgagaacgaccttgatcgtggcgttgtctttttcaaccggtactttgacagtgtatgtttcccatgagcctgctgctgattcggtcggttttaccgtgacatgtgcgctgaccggcacggagaaaagcaaaaatgatgctaggattgcacccatccataatgtctttttcaacataatcaaaactcctttttattaatttttgcattgaaaactgttctgatttcctcaaatgacgccgttaatccgtgaacgcggatcttccagatgccgtcttcgcttaaatttaaatttttcgtttggaaaacaccgtctttatttttgctgaggctgaacgtgctttccttgtcatccccgaaaagcccggttttctcaacggttaattcaattttttggatatctttgacgacgtctccttttctgtttctgacggtgacttcaaacgtatttgagcccggcatgtttgggctgattcggagtgacagcgtatttccttccgtcagctgcttcgtctcactgaaaggctgcggcagcggcgcgggcggacttggaatattggtgaaaaccgccgtggtcagcagaatgagaagcccgaccgcccattcagctttcatcgaacggccgtcctgctgtttcggcgcttttctaaaacgaaaatagtgaaatgccccgagtccgatcatgagaaggacgagcgccgatttcacaaggagcgcttttccgtaagccgtcccgaacaggttatccagtgtatgaacaatgaaaaagctgttgaaaaggcccgagaatatgagtagccctgctgaagcgagcgcccatggcgagaagcgccgaatggtttcccatatcaaacttttgtcaggcttcagccagtcttttccgaaaaacagcacaaacatcgcgagtccgccagtccaaatggaagcggcattcagatggatgaagttcatcgcgattgtcatatagcctgcgctcgtcgaagcggcatggccgtcgagcgatttgacgaacaatagtccggcaaaaaggaacaggctcaagatcgcgctcttcaggccttttctattcgaagagaaaacaagcaaggcgatgatggcgatgttgatcagccacagcgttccgcccgtcgtattcagaagcgtttcttttaaaagcgaaggctgaaaagccccgatccaggaaacgcctgcgtttgtttttgtttgcagtggcagctgaatgatgatggcagcccctgtcaataagagcgccacattcgtgatccgcttcagacggcgctttttgtcacccggccagccgttttcaggtcggtgccagacgagctgaaaaagagcggctcccatgaacagggagaaaccggtatacaaaaggacgcgttcaatgacgatatcggctgccggcaggcctgatgcttgattttgctgatctttcggcagcccgccttgaatgtttccgatactaaaagggatcgtgcctgatacaggatgaccgtctgcggatacggctctccattcggccgagtagatatcatcctttaacttcggtttcagcttgacggtcatgatctttgcgttttgggggtcgatttccgttttgccggaatctacccgttcacccgacgaatttctgaccgttatcgaatgaaacccgttctgaatcgcttcattgaattcgatcttaatttcttcaggcgcttttttcagctcctgattttcagcaggagttgattgtacgatataagcgtgagcaaaagcggcttttggcagcagaatggtacaaagaacagccagaactgcccagagtgttgctcttttcatcacattcatccaatctcttaacaaaatttcatgtcttcaggctgcagcagctgttcttcatcgttttctggaccagaagcgcggcatcgtcaaacgataacagctgtccgccaaagccttttttgaatttccgcgcttctgcttcagaagcgaaagggagcgcatgcggctcgcagcagttcaaatgaagatctgtatccagcaaaaagacggcagctttggcgctgatcgtcgtatccagcaaaaaatccctgcagataatctgtgatacatcatctttcactttctcatagcggagcattgcgcaatgcgcgcagcaaaactgttcaatttggctgtcgtttttgacaatttgcacggcaagcctcgaacctgccccttttccgcaaacgacgcaaagctgcccaagctgctgcttcggcttgtttagcgtaattccgcctgcggtcttgatgacctgcccgttttcaacgagcggtttaatgtcgcggtaaacggtcatttcagagacgttcagccttttcgaaatttccgaaatgcgcagagattcttcttctttgatccaagccaaaatctgctcccttcttttaatcggtagcattctcctcccccgttctttatgttctgtacttataagcctagtagattgaaggaaaagaaacaagcggaacgtgataaaaaatgtgatgaaatgttgaactttaacatcgcggccaaagccgttgaatcgtcgtcaatgggtactggtcaaaccgtcctgtttctaaaattttttgtcaggaaatgtaacaggtttgcacgctttagcgatgcaatgtgaaataataatccggagcaaagctgcagaggggaggggagaaaatggggaaacaaaggcttgttttaataggaaacggcatggcaggggttcgcacggccgaagagatttcactacacggcgggagccggtttgagatcgtcatcatcggcagcgaaccacacccgggctataaccggattctgctgtcttctgtccttcagggagaaacggattggaacgatgtgatgacaaaaagccggagctggtatgaagaaaacgggattaccctttatacaggggaaacggctgtcgcaatcgatacggttaatcaaacggtggcgacagatcaaaaccgcgaaatcgcttatgacaaactgatcattgcgacgggctcttccccgtttatcctcccggttcatggtgcagacaaagaaggggtatatggttttagaacaatagacgattgccgggcattcataaacgcatcaaagcgatttaaaaaagcggccgtcatcggcgggggaatattgggccttgaggcggcgcggggattggcaaacctcgggatgaaggttgatgtggttcaccactcttcctcaatcatgcagactcagcttgatccgccggcttctgccatgctccagaaagagctggagcgtcaagggatccattttcttttggagaaagatacagaggcgattttaggaacatcgcgcgcggagggtgtgcggtttaaagacgggacgaagatcagcgccgatctcgtcgtcatggctgccggtgtcagaccgaatatcgaactggccaaggcgagcggtatttcaaccaacagggcgatcatcgtcagcgactatatggagacaaatgttccaaatgtctacgccgtcggtgaatgcgcggagcataacggaacggtctacggcttagtcaagccactgtatgagcaggggaaagtgctggccaaacatatttgcggcctcgaatgttccggttatcagggctccgttcagtccgcggctttaaaaatgtccggaatcgacgtcttttcggcagggaaaatcacagaggacgactcgacgacggctattaaacttttagacgaagcggccggagtctataaaaaagcggtctttcaaggggataaaatggccggcgtcattttatacggagacaccagcggcagtcaaaggctgttggaaagcatcatcaaacaaagggatattaccgttgtcaaaaaagagctgtttcaatcggaggaagacagttcagtcgcttctatggcggttcgtgaaacgatctgccaatgcaacgcggtttcaaaaggcatgatcatggaagcgatacagacgcacggtttaaagacggccgaggaggtcaaacgctgtacaaaagcttccgggtcatgtggcggctgcaggccgttggtcgaggaactgctcctccataccgccgaacatgatggtcacatatctgcggcggaacaaccgatgtgcgcctgcacttcattcacggaagatgaagtcgtgaacgaaatacagatgagaaatctttcttccgttcacgaagtcatctcggcgctcggctggaaaaatagcagcggatgccggatttgcgtgcccgcgcttcactactatttaaaaatgatccgtccggacatcgcctatgaggagcacgaagaggagacggatgccatcatcccgcaaatgtacggaggccggacgaatgccgaagagctgaagcgcattgcaggagtgattgaaaaatatcaaattcaagaggtgtacatgacacaccatcagagattaaagcttgccggcattaagccggagcttatagagcgcgtgaaagaagaactcggcatgccgtattgcccgccgcaacagcagcggatcgccgcggttaaaacgtgcccatgcggatcaccgcagattcaaacattggcagcagacttggaaaaagcagcagaatccctcctcattccggccaaggtctccattggggtgtcgggctgtttggacgattgcgtgtacgcttcagttcatgacatcggacttctcaaagtaaacggaggatgggagttttatgcgggcggccaaggaggacagcatgcttccccgggagagctgctttcagtagccgactcggcggaggaagcgggtgaactcatgaaaggcctgcttcaatattaccgcgaaacagcaaactatcttgagaagatcgggcattggattgaacgcgccggcatcattcatatccgggaagttttatttgacaacggacttcgcggccagctgatcgaacggcttgaaaaagaaaagcggctggctcagcaagaaacgataaaagggctgatgtgaattgacagaacgattgctaaagtactttcgcacaaagcaaaaagaagtgcaatccgaaaaaacgtatgacacccaatgtccattttgcagcatgcagtgcaaaatgcagctcattgaacagacgattgtgacaagaaaaaagtacacggcggtcggaaaagacaatccgacgacaaaggggcggctgtgcatgaaggggatgaacgcccatcagcacgcgtttcattcagagaggatcacccatccgctgatcaaaaaaaacagtgaattcgtccgtgtgtcatgggaagaagcgcttcagtacatcaaagaacaagtaacagcgatccagcatgaagacggccgcgatgctttgagtgtatacggcagcgcgtccattacaaacgaggaagcgtacctgctcgggaagttcgcccgcgtcgccttgaagacgaagcatattgactacaacggcaggctttgcatgtcggcggccgcaacagctgcaaatcaaaccttcggaatggaccggggactgacaaatgccctttccgagatcccccatgcaagggtcatcatcctcgcaggtacgaatatcgccgagtgccagccgacgatcatgccgtattttgaagaagcgaagcaaaacggggcgtacatcatcgtcattgatccccgcgaaacggcaacggccaagatcgccgacctgcatttgaaaatcaagccgggaacagacgccgcgctcgcaaacggaatgctgaaaatcatcattgaagaacagctgacagacggagcgtttatcagagatagagctgaagggtttgaagaggtcaagcgccatgtagcatctttatcgcttgaagacatttcggccaaaaccgggatacaaatcgagcagatcaaaaaagccgcggtaaaattcgcccgcgaggagacgggaatgctgttcacggcaagaggggttgaacagcagactgacggaacggctgctgtaagaaatttactgaatattctaatatcaacggggaaaatcggcaaatttgcttgcggctacggcgccgtcaccgggcaaggaaatgggcagggggcgcgggagcacgggcagaaagcagaccagctgccaggttaccgttcgattgaaaatgaagccgaccgcgcctatattgcggatgtttggggcataaaagctgaagatcttccgggaaaaggcgtatccgcttatgaaatgatgaagaaagttcatgaaggcgaaattacaggaatgtttttaatgtgttcaaaccctgttgtatccagcccgaacgccggctttgtcaaatccgctttgggtaaattaaagttttttgccgccgttgatttgtttctttctgaaacggcaatactcgcggatgtcgttctcccagcatcatcctatctcgaggacgaaggaacgatgaccaatctggaaggcagagtgacattaagggaagcctcaaagccgtgtcccggtgaagcgaggcatgactggcaaattatttgcgatatcgctaaagcgcttggaaaaggccgctatttttcatatcgatcggcagaggatgtttttaatgaattgagaaaagcgagccgcggcggaattgccgactattcgggcatcacctatgaacgtctgagaaaggaaggcggcattttatggccctgtccagaagaggggcaccctggaacacagcgcctgtttgaatcatccttctcccacccggacaaaaaagcaagaatgtgcgtcgtcccgaacgaaccaaaggtcaaaaaagatgtaccgactgaggagtatccccttattctgacgaccggaagggtgatgtctcactatttaaccggggtacagacgagaaggagcgccgcgctcaaggcgagacactttgaatcatttatggaaatccatccgaaaacggcggaaaagtacaatattggcgaccgggtgctggtcagggtggaatcaaaaagaggcagcatcatcgtcaggagcaaatggtcggaagccatcaggccggataccgtttttgtaccgatgcattgggcggattcgcaaaatgtgaacgatttgatagcggaaacgctcgatccgtcctgcagcatgccgggatttaaggtttgctccgtgaaaattcgtccgtcagttgacaattttgtgaataaattgtcataaaaagtcataaaaagtttacaaaattaactataatttgtgatagttttaaagatgtaaatagaatacttgtttagggcgtatagtgaattgttttgaaaaaggggaggatcatagtgaaaaaaaagcagcttgtccttgtagggaacggtatggccggggtcagggccattgaagaaattcttaaaatttcaaacgaagagtttcagatcacgattttcggcagcgaaccgcacccaaactataaccggattcttctttccaaagtgcttcaaggagatacggatgttaaggacattacactgaatgattgggattggtatgaagaaaacggcattcagctgtatacaggtgaagaagtcgttaaagttgatccggagtccaaaaccgtcatcacggatacgggaagagtccagccgtatgatgaactgattttggcgacaggttctctcccttttattctgccattgcccggagcggataaagaaggtgtaacagctttccgtgatatcaaggatacggatatcatgctcgaagcttccaaaacgtacaaaaaagcagcagttatcggcggcgggctgctgggactggaagcagcgcgcggacttctcaaccttggcatggatgttaccgttgtccacctcgcgccatatttgatggagcgtcagcttgatgcagccgcaggacggcttttgcaaaaagagctggaaaagcagggcatgaaatttttactggaaaagcagaccgaagaaatttacggagaaacacgtgtcgaaggcttaaaattcaaagacggctcaacgcttgaggccgatttggtcgtcatggcggtcggaatcaagccgaacgttcagctcggcaaagactgcggccttccggtaaacagaggaatcgtcgtcaatgattacatggagaccgaagttcccaacatttacgctgtcggagaatgcgcggagcataggggcattgcctacggacttgtcgcgcctctttatgaacaggcaaaagtgcttgccaaaaaaatctgcggcgttgaaacggctccgtatgaaggatctgttttatctacccagctgaaggtttccggtgttgaggtcttttctgccggtgactttaatgaggatgacggagaagacaaaaaagcgctcaaagtgtttgacgaacaggacggaatctacaaaaaaatcgttctgcgcggcaatcaggtgatcggcgccgtactgttcggagacagcagcgaaggaaacaggctgttttccatgattcaaaaaggagcggatatttctgatacttcaaaaatttcaatcttgcagcctttgaatcaggaagaaggcatgagcttgaccgctgcgatgagcgacgatgagatcgtgtgcggctgcaacggcgtttcgaaaggaatgatcattcaggcgatcaaagagcagggatgcacatcgacggatgaaattaaagcatgcacaggcgcatcgcgctcttgcggaggatgtaagccgcttgtcgcagagattctccagcatacgctcggctcagaatttgatgcttcagcacaaaaagaagcgatttgcggatgtacggacctttcaagagacgaactcgtggccgaaatcagagaaaaagggctgacccatacaaaagaagtcatgaacgtgctcggctggaaaacggcggaaggctgttccaaatgccgccctgcgcttaactactacctcggcatgatcaatccgaaggaatatgaagatgaaagagaatcccgcttcgtcaatgaacggatgcacgccaacattcaaaaagacggcacatattcagtcgtaccgcggatgtacggcggggtcaccaattcgaatgacttgcggcgcatcgccgatgtcgtcgacaaatatgaaattcctctagtgaaaatgaccggcggccagcggatcgatctgatcggcgtcaaaaaagaggatcttccgaaagtatgggctgatcttgacatgccttctggatttgcttacggaaaaacgctcagaaccgtaaaaacgtgcgtaggcgaacagttctgccgcttcggaacgcaagattcaatggctctcggaattgaccttgagaaaaaatttgaagggctctacacgcctcacaaaattaaaatggcggtttccgcttgtccgagaaactgtgctgaatccggcattaaagatatcggcgttgtcggcatcgacggcggctgggaaatttacgtcggcggaaacggaggcacacatctgcgtgcaggcgatctgttaatgaaagtcaaaacggctgaagaagtcatcgaaatcacaggcgcatatctccaatactatcgtgaaacagccaactatttagagcggacatctgcatggatcgaacgtgtcggcttgtcccacgtccaatccgtattgaatgataaagaaaaacgcaaagagctgaatgaccgcatcaatcaagcgctgtctgtccataaagacccgtggaaagactttttggaagacggaaagacaacaagacagctattcgaaaatgttgtcacttcctaaaatgaaaaaccaacttgaggaggaattcacatggtgaacaagaacttaacaaaggtgtttgtttcgaagatcggggatttgccgaatcagcttgggaagacagtgttcatcaaggacaaggaaatcgcggtattcaagctttcaaacggcagcgtccgcgcgattgaaaaccgctgcccccacaaagggggcgtgcttgccgaaggaatggtaagcggcgaattcgtcttctgtccgatgcacgactggaagatcagccttgaagacggcaaagtccaagagcctgacacggggtgtgtgcagacatacgaaacggtcgttgaaggcgaagatttgtatatcgtttattaaacggcgcaacaagcgaaacgcaatatttcaaaagccttaagggtcgcagaacgtgacccctctttattaaaaaaacaaacgcgttcacataatcggcagatggaaggatgacagttgatggggaatgggaaagtttattttgtcggggccggaccgggcgattcaggattgatcacattaaaaggaagaacgctgatcgaggcggcggatgtcatattgtatgacaggctcgtcaattcccggctgcttgagcatgcaaaagcatcatgcgaatttgtctactgcggcaagctcccggaccgccattatatgaggcaaagtgaaatcaatgcactgctcattgaaaaggggctgaaaggcctcaaagtggtccggctgaaaggaggagacccgagcgtgtttggcagagtcggggaagaagcggccgccgtcagcgaacacggcatcccgtacgagatggtgccaggcattacatcgggaatcgccgctcctctttatgccggactgcctgtgacccaccgcgatttcgcttcatcctttgccgttgtcaccgcccatgataaatcgggcaaaccggagatgaattgggaagggctggccaagggcgtccaaaccctcgtcttttacatggggatcaaaaaccttggttatatatgcgagcagctgatgaaacacggcaagtccccccttgttcccgcaatggccatccaatggggcacatggggccggcagcggagtgttaaagggacattgcagaatatcagggagaaaataaccgagcatcagatcaaaaatcccgcgattatcgtcatcggcgacatcgtatcattcaggcagaacagctggtttgaagaaaagcctttgatcgggctgaacatcatggcagtcaaaagctgtgaagaagaacaaattccagtggaggcgcttcgtgaacaaggcgctgaagttgtggaatggccgaaatggaaatcggccgaaacggtgcctgacgatgcacttttaggtcgaatcgcttgttttgacagcctgctgttcacctcaagtgcgtcactgcgcagatttttcagccggcttgctgctttgaagatcgatgtcagggaaatgcgcggaaggctttacgcttcagatcagcatgtaaaagcagctcttgaagaacggggatttgaagcctttctgcaaacggaaatgccggtctcgggcagctgtttgctgatcggcagccgggaagccgtgcaaaattacccgcactccgggtgcgaggtattgattacacatgacagggtgatcgacagccgctttacctcgatcatcaaacgggaaattgatgagtttcctattgatatagtgttgttttcaaatcgaacatgcgtcgagctgttcgtaaacgaggcggagacagtcggcctccatccggaaaaaacggctgcccgtcttcaggcgttctgcctcactgaagaagcgggggagagagctgcagccgtagggtttcagcgcgttcatgcagtgaatgatcgcgatcgcctgccggatgtcatcaaagagatcaaccgaacagccgaatttgtctgtcagagctgaaaaaagcagggggaaccctgcttttttagcgtgcggcactgcttctgaacaacacctcttttaagtagcaaaggtctgcctctatatgcttcctcattgattcggctgcttttgcgtcatttctgtcctgcatgtgacgcagaatctcctcgtgctgattgatgatttcaagagtgcgctccggtttttcaaggtttttgctccggtagaaaaaggtcagcgaccgtaaatcaagcagctgtttttgcaggcgttcgttttcgctcgcttcgatgatggcatcatgaaattgcgtatttaggcgaagcagagcattagccgactccggaccttggcttttctggtgcttatgcgcctcagagagcgtttcggaaatgagctccagtgtttcattagaggcaaggcgagtcgccaaagaaacggccagggattcgagcgcctgacggcattggtatatttcttcaagatctttgattgtcggttcataaactgtaatttttgatttatcatctatcaataacaggccttcttgttcaagtgtccgaatcgcctctctgacggggctgcggctcacttgcagctccttggcgattttggattcatagatccgttcgccgggctgatatcctcctttaataatcatatcttttaaataatgatggacttgatcatgataagagactgcacgttggatcgaaaacttcacgctgttcacctcgtttatttttcactgcggaaatcactaatagtctagcaaaaagagagaaataccatcaatctaaaattaccataatattgagtattttgtgacaaaaaaagtgttgactgccattagctgtccgttataattaagttataactgtcgacagtcggcagattactttttgattattattgtaagcgctttatagatagaggggaagggggagttttttatgaaatcaagcgttgtgtcagcatgggatatgctttggagatcacaccgggaagcaaagaggctgcttttgttcgccatgcctgtcagggcgggaaaagatgccggtttaaagataaattcggaacaaaccatgaaggaagagaagccgccgagctataaaacgcctcaaaaaatcgggctgctgcttggtcctgcattgtttttcgctgtccttttgttcttttttcccgagggtctgagctatgaaggtagaatggtattggcgactactttgtgggttgcggtttggtggattacggaggctgttccgattccggctgcatcattgctgccgatcgtgctgcttccgctgacgggggcgctggaaggggcagctgtcacgtcgagctacggcgatccgatcgtctttttattcttagggggcttcttgattgcacttgcgatggaacgttggaatctccataaacggattgcgctcaatattatttctgtagtgggcacgagcacctcgaggatcgtcctcggttttatggcggccacaggatttttgtctatgtgggtctcaaatacggccgcggtgatgatgatgcttccaattggaaccgctatcattcatcaggtatcagctgtcataaagtctgaaagaaaagatttagccgcagaagaggcgaaattttcaaaagcgctgatcttcagcatcgggtatgcggggacaatcggcggactcggtacgctgatcggcacgccgccgaacattattttggcggccaatattaagaagctgtacggagttgaagtgtctttcggcggatggatggcttttgccgttccggtcgtcgtcattttgcttgtagcggtatggctgtacttgacgaaagtggcgcatccgatcaagatgaaggagcttccgggcggaaaagaattgattctcgaagaaaaaagaaagcttggaaagatgagttttgaagaaacaatggttctgctcgtcttcgggtttgccgcgtttatgtgggtgacgagaacgtttttatgggatgacaaaataccgggtattgacgatacaatgattgcgatattcgccgcttcattgctcttcttgatcccttcgctcaataaagggggcagggtattggactggtcggtatcgaaggacttgccgtgggggattctccttttattcggaggaggcttggcgctcgcaacaggttttaaagaaacgggtctggcggagtggatcggcggaaggctgacggtattggatggatttaactttgtggttattgtcatcatctcaacggcattggtgctgtttttgacggagattacgtcgaatacggctacggcgaccatgattctgcctgtactggcctcgctcgctttagcgctgaatgttcatccgtacgcattaatggtgcctgctgcaatggcggcaaactgcgccttcatgctgccggtcggcacgccgccgaatgcaattattttcgcatcgggcaaattgaagatcagcgaaatggttcgaaccggctttgtcattaatattttcacgctaattttaatcgtcggagctgtgttctacattcttccgcatttatggggagtagatctgaccgtcttccccgacaatctgaaatcgaattgatgaagcgaagccggagcttaagccccggcttttggtcatggtgaagcttgcaattgatcgttcagcagccatttaaaaagagaaaaaaagaaactgctgaaaaaaggatgatcagcatgaacaaccctgtactgccgcatcgatacccatttctattcatagattgtgttgtagagagtgagccgggaaaatgggtgaaaggctataaattcataacggaaaacgactggttcatcaccgaaaatcaaaaggaaatgccattttcatcttaatagaagcgctggctcagaccgcagcatttactgcgttgaaagaaccggctgaaatcggctttctgtcttcggtgaaaaaagccgaatgcaccggcaaggccgttgtgggagacaaacttgatctatactttgaagtttcccgctataaacgggggtttttattcggcaaaggaaccgcctcagtaaacggaaaacctgcagtgaaagcagagatcggaatttttatggagcaaagtgaaagcgggggagaagattgatagaaataaagcctgtcgcgtttgtggaaaacttgcggactttcccgaaggatgatcattggggcgatgtgatttctgaaattaagttggctgaaggcatccatccggacgctttaaaagggatcgaagaattttcccatttggacattatcttttactttcatcaagtaaaagaggaacacattcaatataaggcgaggcgcccgagaaacaataaaaactatcctgagacaggcattttcgcccaacggggaaaaaacaggccgaacaggctcggcgcgaccgttgtcaccctccttgaaaaatccgggagcaagcttgtagtgaaagggttggatgcgattgacggaacacctgtaatcgatatcaaaccggtgatgaaagagtttctcccgaaaggacaaatcatacagccgaaatggtcggaagatttgatgaaagtatattggcatgcagctgattgatagaaaaaacctctcaacaccttctgagaggttttttcatgcttatacgataaaaaagaaggatatcagaccaatcttgaagatcggaagtcccatgaattgtgcccaatcggcaaacaaaatgaaagcgctttattatatgatgtcaataagggggtcgcaaaaatgatcaacgagaaacgtcctgctcaattgctccaatatttgctgcgtgtcagagaggcgacaatgcatcagctgattgatcattttcaattatcgaaacggcaaatctgctatgacctggacaaaatcaatcattggctgaccggcaagcagctgcctgaaatcgaatataaaagaaagaacaggctggccgttccggaaacattgcttgaattgcggttctccgaagcctgttcagacatcggccgctcgtttatttttacgcaggaagagcggatcaaggccttgtacatgtttctgtttgtccgcagggagccgatttcatccgctcatctgacacagctattgcaggtcagcaaaaatacggtcatgaatgatgtgaaaaaagcgaatgaggcgctgactccgtttttagtggcgatcaaatatacaagacagcgcggctatcatttaataggaagcgagtttgataaaagagttcccgtcatgcaccacctttcttctttcctgcaaaagccttacggcaaagaaatccttcattatattttaaaaatttccggctcgcgcgatcacaaacaacaagaatttaaaagagcggttgaacttgtctcaaaagaatacgggcttcaactcgtcgaagaaaggcttaatgaatttatctactttctgatgatgtattcgatcagagtggccgaaggaaaaattgtccgttttcaccaggaggagggtgagcttttaaagcaaagtccgctgaaaaacgcagccgtaaggcttgtgaatgagcttcggattcccgttcatgaaacggaactttgctacattttgatccagctgctcggtctttcattcggacagcagccggcgcatgatccgctttatcagctgtgtgaaaaacttgtatttgaatttgaatcaagagcatgcatcacatttcccaggaggcgcgaggtggcggaatctctttaccggcacttgaagccggcatatttcagaatgaaataccgcattccgattcacaatcccttgctcagcaaaattaagaaagagcataaagaactgtttaccatcgttcaaaagctgatgcggcaccttgaagcgctgttgaacaaaccggttccagaggaagaaatcggctttatcacaattcattttggtgcattgcttgagcagccggtgcagtccgggtcatccaaaaagacggcagtcgtcgtctgtccgagcggtgtcagctcatccttaatggtcaggcgccagcttgaatcgttattttcagagattgtcgttgagaaagcgatgtctttgcaggaattcacacctgacgtctttgatcattatgatgccgtgttttccaccgttgagctgaaaaccaaaaagcgatactacatggtcaggccgctgatgacgcccgctgaaaaaagcaggcttgtcaatgaagtgtatcaggaaatgttcggtgtgaagcaaagggagcttttgacagacgaatttcttcacatcctcaagaagcacgccaaaatcatagatgaaaaaggactaagagaatcattgaaaaatattgcatttgttcaaaaagtgacggaaacaagggggaaacgaccagtgctgaaagatcttctgacagatgaaaccattcaaatggccgaccaaatcaaaggctgggaagaagcgattcaaacagcggcaaagcctttgcttgataaggaggtgatcttgaaggaatacacggatgccatgatcgacaatgtcaaaacgatgggaccttatatgattatcggccccgagattgccatccctcatgcaagacctgaaaagggcgtccaaaaggtgggaatgagtctcctgaaactgaaggagccggtctattttttggatgatgagcagtatccggtaaggcttttgttttgcattgcggcggttgaccatacgacacatctgaaagcactttcccaactgacccggcttctcagcaataaagaaaatcaggattccttaaaggaaaccgagtcgttggagcatatcaaacgtttaatcgaagcctattcatccaattaaaaacaggagggataatatgaagatattggcagtttgcggatcaggactcggaagcagttttatgctggaaatgaatattaaggatattttgcaggaaatggggttaatggagatcgaggtggatcattcggatttgagttcagcgtctcctgatcaagcggatttgtttgtcgttgccaaagatatcgcggaaggagcggcccacctgcgcgatatcgtcgtgcttgaaagcattatagacatggatgaactgaaaacaaaactggttaaaacattgcaggaaaaaggagtgctttaatcacagaaaaggaggaactgcaaatgggtgaaagagcgctaaagctgatgatggatgtgttaagccagccggctgtattaattgcagccatttctcttatcggtcttctgcttcaaaaaaagcctgccaatgaaattgtgaaagggacgaccaaatcgtttttaggctttatcgtgatttcagccggggcgggcatccttgttggctcgcttgagccgttcggaaagatgtttcaagccgcctttcatgtgaacggcgtcgttccgaacaatgaagcgattgtcgcgatggcgctcaatgaatacgggacggcaacagcgctgatcatgtttttcgggatgctgtccaacatcttaattgcccgttttaccagattaaaatacatttttttgaccgggcatcacacattgtatatggcatgtttaatcgccgttatactggcggtggcgggtttgaagggcccgtttttgatcggcgtcggagctgtttcgctcggcttgacaatgagtttgtttccggcgatggttcagccttttatgaaaaagataaccggcaatgataaggtcgcgttcggccatttttcttcaatcggttacgctgtgtccgggttaatcggcaaagcggcaggcaagggctcgcgctcaactgaaaaaatccggtttccaaacggcctcggatttttaagggacagctctgtcagcattgcgctcactatgaccatcttgtacgttttgattgccttatttgcaggggcgggctatgtggagcgcgagttgagcggcggtacgcattatcttgtcttctccgttattcaagcggtcacatttgcggcaggggtgtttattattctttcgggagtcagactcgtgctcgcggagatcgttccggcttttaaaggcatatctgacaaactcgtaccggattccaagccggcactggattgtccgatcatttttccgtacgcgccaaacgccgtattaatcggctttttttgcagcttcattggcggcatcaccggcatgctgattctcggagcggccggagccgtcatcgttcttcccggagtggttccccactttttcacaggagcttcggccggcgtcttcggaaacgctgcaggggggatacggggagcggtcttggggtcttttgtcaacggtctgattatcacgtttttccctgtgttcctgctgccggtcatgggtgatttaggctttgccaatacgacattttccgataccgattttgccgcaacaggaatcgtgcttgggcatgcggtgaaactgctgggatctggaggcgttgtaattggaatcgcagcggtagtggttggcgcagtcttgttcggctttaaacgcggaaaggcggaaaagccagatcagaaagtcgaagcataaaggagtgggcaatgatgtcagtaagggaaatcgatatggagcgttttcgtgatcaaatcaggctgctgacattgaaacagcttcatcacctcggctttggacattatggtggcagcttgtcaatcgccgatgtgttggccgttttgtatggaaaggtgatgaaaatagatcctgccaatccgtcgtgggaagatcgggacttctttatcctttcaaaagggcacggcggccccgccttatatgcagcgcttcatctttccggctattttgaagaagatgtgctctatacgctaaaccaaaacggcacagctcttccgtcgcaccctgaccgaaatttaacaccgggagtcgatatgacgaccgggtcgctgggccaggggatctcggctgcagcaggagtcgcgctgtcgcacaagctttcaggacgcgctaaccgcacctttgtcattgtcggcgacggggagctgaacgaaggccaatgctgggaagcgatccaatttgcggcgcaccataagctccgcaatctttatgtgtttgtggatgataataaacaacagctggacggcccgacgaaagagattatcgatccgctggattttgtcagcaaatttagagccttcgggttttattccgaaagggtaaacggacacgaaccggaagcgatttatcgtgcggtcaaaagaggcgaagcccagcgggaaaggccggttgccgtcatccttgatacggtgaagggaaagggcatcccttattttgaaaaaatggagaacagccaccacattagagcaaatgaagagcaaaaccgcatgatcgaaaggatcattttgacgcttgaagaaaaggaagtgagggcatgaatgaggcggcaaatgtagagctggacgctgttgaaatgaggcaggcatacagctcagccgtttatgaactggctcaagaaaacacggacatcgtggccttggaagcggatttgatgagctcgatctccatggacaaagtcaaacggcgcattcccgagcaagtgatcaattgcggtgtcatggaagccaatatgatagggattgcggccgggctttcgttaaccggaagaatcccgtttgttcacacgttcgctcagtttgcgacaagacgctgttttgaccagctgtttgtttcaggtgcatatgccaaaacaaacattaagattctcggatcagattcgggaattacggctgaacataacggcggaacccatatggcctttgaagatttgggactcgcccggctgatcccaaacgcctttgtttatgaagcaagcgatgcggcaatgctcaaatttttgatcaaaaaggctgcggcagagtacggcattcactatatcaggacgatcagaaaaaaggctgtcaggctttatgatgaacacgaaacattcgcagacggaaaagcaaaagttctcaaagatggcagcgatgcggcgctgtttgccagcggcatcatggtcgccgaagctttgcaggcggctgaactgctaaaagaaaaaggaatcgatgcagcagtgatcgatatgtattgcatcaagccgattgatcaagaaacggtggttcgttatgcacaaaaaacgaatgcgattgtcacggctgaaaaccataatgtcataggcggattgggaagcgcagttgcggaagtgctgagtgaacattatcccgcgccgcttaaaagaatcggggttcatgaagccttcgggcaggtcgggacaatcgattatttgaaaaaatcttaccgtttgaccgcagaacacattgcactggcggcggaacagctcgtttaagatttctttgtcctggccgatttttatattagaatagataaaagcctaaaaaaagtggaggtatcttaaatatcgtgtcagtcagtcaaagaaatcgaatcgatgtgaagctagtagctctggatatggatggaacactgttaaatgacgaacaaaccatttctgatgaaaacagaaaagcgattaaagaagctgaggaaaaaggggtttatgtcgtgcttagcaccgggcggacgctgatgacgtgccgggagttggcggagtcgctcgaactgtcttcttttttgatcacggcaaacggcagtgaaatctgggattcgtctttcaacctggtcgagcgccagctgcttcatcccgatcatgtccaaatgatgtgggatttgcgcaatctgcacaacaccgatttctgggccgccagtgtcgataaagtgtggagaggcgagtttcctgaggatatacaagcgtatgaatggctgaaattcggctttgatattccggatgacgacgtcagaaaccgggtcctggaagagctgaaaaagaacaaagaattggaagtcaccaattcaagcccgaccaatattgaagtcaatgccatcgggatcaataaagcggccgctttggcaaaagtgtgcgagcgcctcggctttacgatggaacatgtgatggcggtcggagacagtttaaatgatatcgccatgatcaaagaagccggtttaggcgttgccatggggaacgcccaggaaatcgtcaaagaaaccgcggactggattacagattccaatatcgaacacggagtcgcaaaggcgatcaggcattgggtattgtcctagccgaaaaaagagccgatttgcggctcttttttttgtgcaaaataaaaaatattcatggactgaagcaagctgaaaaaccttgtgaaatcaggtttatcagctaaagtttttaggtataacgatttattttatgtgaggtttcctaacaatatgatgccaagcgggcaaatccttgatataatcaattcaagtttgattattcggaattaatgttccgaaaatcggaacaaaacgagggatatactaaaattcgaccgaatgtgcatcaatatataggggggatttgatgaatcaagttgatttaaactgcgatcttggagaaagcttcggcgcttataaaatcgggctggatgaggagattctcgagtttgttacatcagccaacatcgcttgcggatttcatgcgggagaccctggcgtcatgcgcaaaaccgtcaaaatggcggcggaaaaaggcgtgaaaatcggcgcgcatccgggacttcccgatttagcgggattcgggcgccgcaatatggcgatcacgcctgaagaagcatacgatcttgtcgtgtatcaaatcggtgcgctttcaggatttctaaaggctgaaggcgtgaccatgcagcatgtgaaaccccatggcgcactatataatatggctgcgcaaagccgggaactgtcggatgcgatcgcgcgcgcagtttatcaaacagacccggaactgattttattcggtttggcgggaagcgaacttgtgcttgccggtgaaagagccggtttaaaaacggctcacgaagttttcgccgaccgtacatatcaagaagacggaacgctgacttcccgccgccagaatgatgcgctgattcaagatgacgatgaagccgtcggccaggtgatccgcatggtgaaagaaggcaaggtccgcagcctgcagggaacggatgtcatccttaaagcagatacggtgtgcattcacggtgatggtgcacacgcgcttcagtttgcgaaaaaaatccgccgcgaactcagagcagcagatattaaagtacaagctttttctacatgatgttgacaaaaggaggaataccatttgaaacaaaataaaaaaacaaaagcgccggcaggcaactggacgttgcttttgggcgccgcttttttaatggccacatctgcaatcggtccgggatttttaacacaaaccacagtatttacacaatctttggccgcaagcttcggctttgtcatcctcgtttccatcattttagatattttcgcccaaaccaatgtgtggagaattattgcggtttctgaaaaaagagggcaggaaatcgccaacctcgtcttaccgggactcggctattttatcgcctttcttgtcgttctgggcgggcttgccttcaacatcggcaatatcggaggcgccggtctcggcatgcaggttttattcggcatttcgccgcagatgggagccatcatcagcgccgtcatcgcgattttgatctttgtcattaaagaagcgggaaaagcgatggaccggtttacgctgatcgcaggctttgtcatgattttactgacggtgtacgtcgctgtcaccaccggacctccggtaggggaagcgataacgaagacggtcatgcctgataacattgattatcttgcgattataacgcttgtcggcggtacggtcggcggatacattacatttgccggcggacaccgattgcttgatgcgggtgttaaagggaaggatgcgatccctgaagtaacgaaaagctctgtttccggcattttgatcacgtctgtcatgaggattgcgcttttccttgccgtacttggcgtcgtatcaaaaggtatgcagattaatccggataatccgccggcatcagtattccagcatgccgcaggaaatgtcggatacaaaatcttcggcctcgtcatgtggagcgctgctattacatccgtgatcggtgctgcttatacgtcggtatcattctttaaaacgttttctccgaaaatcgaaaagaattcacgcggcattataattgtctttattattgtatcaacgctttgctttgtaacaattggaaagccggtcaaccttctcgttcttgccggcgcattaaacggcttaatcttgccgatcgcactaggctcccttttaatcggcgcgcataagaagaatgtcatcggcgactacaggcatccgatctggcttacaattccgggcattctggtcgttattgtcatggccatcatgggaggctatacgttaatcaatgaaattcctaagttatggggatgatctcgttgcatgtaaatgaaatgcgtcctgacgaagtcagggctctgattcgaaaaggggaaataacgggtccgacagccggcatggccgggggttttacccaggcaaacctggtgattttgaaaaaagagctcgcttttgagttcttgctgttttgccagcgcaatcaaaagccgtgtccgattcttgatgtcacggaccccggatctccggttccgtccatcacggcgccggacgctgatatccgcaccgattttccaaaataccgcgtatacaagcgtggcgaattggcggatgaagtgacagatatctcttctttatgggaagacgacatggtcggttttttaatcggctgcagctttacgttcgaacaagcgttaatgaataacggaatccctgtcagacacattgaagaaaagcgaaatgtcccgatgtatcaaacgaatattccttgtgtcccggcaggccgttttcaagggcctatggtcgtcagcatgaggccggttccggaagagcaggcggtgcgagccgttcaggttacatcaaggcttcccgccgttcacggagggcctgtccatatcggcagtccagaagccatcggtataacagacatcgcaaaacccgatttcggcgatgcggtaacgataaaaaaaggggaagttccggtattctgggcttgcggcgtcacccctcaggcagtcgcaatgcacgcaaggccggagctgatgattacgcattcgcccggccatatgctggttaccgatgttcgggatgaacaatttggtgtgttataggatttcaaaatcaatacagagcggtttatctgtattgatttttaatttaaggggatgaaaggcaaggtgaaacagaattgaaaaatctttcgaatgcgacaatgtctccgctcggcgactccgcggttatcatccagcttggagaggggataagcgaacagacgcaccgtgtcgtcagcgcgctgacaaagcggattgaaaacgatcagtttcccggttttattgagtgtgtgccggctttcacgagtgtgaccgttttctatcagccatttgaagtataccgcaagatggagagcggcaaggctgttgattctccgtatgaaaaggtaaaagccctcctcgaccatcatctccaagagctcacaatggaagaagagacagatcagcgcacggtggaaattccggtttgttacggcggccgtttcggccctgatttggaggaagtggccgacatcaacggcctgactgcacaggaagtcatcgatattcacacctcgggtgagtacctcgtttatatgatcggctttgcgccgggcttcccttacctaggcggaatgtctgaaaagatagccgcaccgcggcggtcatctcctcggacttcgattcccgccggttcagtcggaatagccggcatgcaaacaggcgtctatcccctttcaacgccgggcggctggcagctgatcggcaatacgccgcttgaattattcaagccttatgaacagcctccgagccttctgagagcaggggatatcgtgaaatttgtcagcgtgacagaagaggagtatcacgcgctgaaggaggggaaatcttgagcatagaagtgttaaagccgggtctgatgacaacggttcaagacttgggccgcacaggttttcaaaaatacggcgtgcttgtcagcggtgccatggatgccgattctttgcggattgccaatctgctcgcggggaacagccagaacgaagctgcgcttgaagtgacgctgatggggccggggccgtctctccgctttcaaaaacctgctcttatagcggtgacgggcgctgacttttcactgatggtaaatgacgaagaagtcccgctttggcgcccggttttcatcaaagagggcagcgtgttgacattcggcatgtgcaagcgcggaagccgtgcatatatggcagtggccgggggaattgatgtgccgcctgtaatggaaagcaaaagcacatatgtcagagcaggactcggcggctttcaaggaagggcgcttcaaaagggagacgtgttatcgctaggcagcccgacgccgttgtcggaagcgctgcacagaaagctcgcagacgagggcaaagaacggggctttgcggctccgaagtgggctgtcgaccgcaaatattttctcccgctaaaaaagaacccggtcattcgtgtcatcaaaggcgatcagtttgcttgctttacctcatcatcacaagagcgctttttcgcgggtccattccgggtgacggctaaatccgaccggatggggtaccgtcttcaaggagaggcgctcgaactcactcagcctctggaaatgatctctgaagcggtatcattcggaacgattcaagtgccgcccgacggcaatccgatcgttcttctcgcagacaggcagacagcgggcggatacccgagaatcgcccatatcgcatcagctgatttttctcaggtcacgcagatgatgccgggcgagcaggtgcagtttcagcttgtcagccttcaggaagcagagcgcgtttacatcgaacgggagacgaaaatcagcgaactttctgcccgattgaagcttgaatacatgttatgataggtgtgatgtgtatcaggagggggaaggcatggaacataaaaacaaaacagtcgtcaaagccatgaccctgctcaatctgttcctgacgagagaaaggctctcgctgggcgacatgattgagctgacaggcatgccgaaaacatctgtctaccgcatggtttgttctctcgaagaaatgggttttctcgaccgcgacgagaacgggatgtatagcttaggactgctgtttttgcaatacggccaccttgtttcagaaaggcttgatattcgaaaaatcgctctgcccatcatggaagaactccgcgatgacgtggatgaagccgtccatttaattgtaaggcagggaaatgaagcaatgtatatagaaaaaattgagggcacgcagaccgttcgcctctatacagcgatcgggaggcggtcccctttatatgccggagcctgtgcgagaagcattctgacgtttttgcctgaagaggagcgggatgcctatatcgagcaaacagagctggtgccgatcgcttccggcacgatccgggacaaggctgagctgatccgcattgtggacgagtcgtaccggagcggctgcacggtcagtcattcggagctcgaagactacacctccgcgattgccgcgccgattttcaatcataagcgcgaagtcgcagctgggatcagcatcgccgggtttgaagcccgctttcagaaagaccgtcttccttatttgaccgaaagagtgaaaaaggcggcgcttgacatctcgagaaaattaggtttttaggaaaaaagaaaagtatcctttcgagcctctgccgagtacatatatggtagctgccgcgaaaaaacggcatatcggagggggaaaggatatgacgcttcaatatacggctctcggcgactctttaaccgtcggggtcggtgcaggtttgtttgagccgggatttgtacagcgctataaaaggaaaatggaagaggatttgaacgaagaagtttctttgattgtatttgcgaaatccggtcttgagacgtcggaaattttagcgatgctgaacgagcctttcatcatggaacaggtcaaaaaagcggacgtcatcacgataacgggctgcggaaatgatcttctgcaatcgctggagatatatgaaaaagaaaaggatgaacacgtctttttggaagcttcctcccactgtcagaaaaactactcaggcatgcttgagaagatcagagaaataaagggagaaaaagatacgcgttatctcgtccggcttctcaatttatacaacccatttccgtcaatcgaattagcggacaaatggatttccggctttaacaggcacttaaagcagctagagtccgctccgcaaatcaaggtgatcgatacttatgctgtctttaaaggacgcgaaaaagaatatttgtcaattgaccgtgtgcatccaagcagcagagggtatgaagcgatgtcggaaaagctgagagcggcgggctacgggcggctggagggctgaatatgatgaagaaagaccattccaatcaggaatggtctttttttatgcaattcttcagcgagcagccgaaaacagactaaaaaatgaaactattaaattttgtcacacggctcctgccaaagtgccgttttctttcgattgagcagtcatctgtaagcgttttaatatagaaacagggagccgacattattcgacatcatttttttatcacaggctttaaaggacaacaaaggagggttatgaaatggaagatagacaaaatcaagatttcaaagtaaagattcaacgtttcggaagctatttgagcggaatgatcatgccgaatatcggtgcatttatcgcatgggggatcattaccgcattgtttattccgacgggatggatgccgaatgaagcgcttgcttcattggttgatccaatgatcaaatttttgctgccgctcttgattggatacacgggcggtaagatggtgtacgatcaccgcggaggcgtcgtcggtgcgactgcagcgatcggcgttatcgtcggcgcggacattccgatgttcctcggcgcgatgatcatggggccgctgggcggctacctgatgaaactgacggacaggcttttcaaagataaggtccgttccggatttgaaatgctgatcaacaactttacagccggaattctcggcttcattctggcggtgctcggctttcttgcaatcggtccggtggtgctcggcttaaacaaaacattggcggccggcgtggaagtgatcgtcaatgcgaatctgcttccgctcgcaagtatttttgtagagcctgcgaaagttcttttccttaacaatgcgatcaaccacggtattttgagcccgattggtattgagcaggccgcccagacaggaaaatcaattttattccttttagaggcgaacccaggccctggtctcgggattcttttagcttacatgattttcggaagaggcacatcaaagcagaccgctccgggcgctgcagtgatccatttcctaggcggtattcacgaaatttatttcccttacattctgatgaaaccgctgttaatcctggctgcaatagcgggcggagcgagcggtgtgctgacgttttccatctttaatgcggggcttgcggctgttccttcacctggaagtattattgcggtgctggcgatgacgccgaaaggcaaccacatcggcgtgatccttggtgttctcgtcgcagcagtcgtttcattcattgtagcttctttgattttgaaaacgtctaaagccggcgaagaagatttgacggccgcggcggaaaaaatgcagcaaatgaaaggcaagaagagccaggccgtttctgcattgacttcggctgacgaagcggaagaatcagcggctccgtacgaaaatgtcagcaagatcatcttcgcgtgtgatgccggaatgggctccagtgcgatgggggcatcaattttgaaaaacaaagtcaaaaaagcagaactcgatatcgacgtatccaatacatcgatcaataatctgccggaagatgccgatatcgtcatcacgcataaagacttaacggaacgcgcaaaagcgaagcttccaagcgccagacacatatcggtggaaaacttccttaacagtccaaaatacgacgaactgatcaatcagcttaaaaagtaaagtttgagaacccgtgagcctgaaaatcaggctcacacaacatgtatgaaagagagtgatttcccaatgaaaccagtacttgcaaaagaaaacattcatctcaatcaatctgccgcaacgcaggaagaagcgatcagactggccggaaaggcgctggttgacgccggctatgttaccgcggattatatcgagaaaatgttggagagggaaggcctcacttccacttacatggggaacgcaatcgccattccgcatggtacggaagacagcaagcaggatgttcttcattccggaatatccgttatccagcttccggaaggtgtcgaatacggcgatggcaatattgctaaagtgatctttggcattgccggaaaaaatgatgagcatttggagattttgtcaaagattgcgattgtctgctcagaagcggacaatgtcgaacggatcatcaatgcgaaaaatgaagacgagttaatggcggtttttgaagaaggtgaccaggtatgattgcactgcatttcggtgcggggaacatcggccgcggatttatcggagccttgctctgcaaatcggggtatgatgtcgtgttcgccgatgtaaatgatgccgtgatcaatgaactgaacgataagggccgctataccgtcgaaatggccgatgccggaaggaagcaggaaacgatcggaccggtccgggcgatcaacagtgcgacccagcttgacgaattgtatgatttgatagcgaaagccgaccttgtcaccacagcggtaggcccggcggtgcttaaattgatcgcagagccgattgcagaaggtttgaagcgtcggatgaaaataaacaagcagcctttaaatattatagcttgcgagaatatgatcgggggcagcgctcatcttcgcgaggaaattttcgcccgcttaactgaaacggagcgcgccgcaatcagcgattcagtcggctttccgaactcggcagtcgacagaatcgtgccgatccagcaccatgatgatccgttgaaagtaacggtggagccttttttcgaatgggccgttgatcaaacggaattcgccggaaaagtgccggatattgaaggtgtgacatatgtagcggatcttgcgccattcatcgaaagaaagctgtttacggtcaataccggacacgccatggcggcgtatgccggctataagaaaggtttgaagacgataaaagacgccattcatcatccggaggtccgccaaacggtggcaggcgcgctagaagaaacaggccggtaccttgtccaaacatacgattttacacaggaagagcaccgggcatatatgacaaaaattatcggccgctttgagaatgaatgcctgtcagacgatgtcacccgtgtggccaggtcgccgcttcgcaagcttggcagggatgaccgtcttgtcggcccggcccggaagctttgcgatctcggctttgaacctgtccgccttgcagaaggcattgccctggcgctgcagtttgattgtgccgatgatccggaagccgttcagcttcaaagcatgatcgctgaaaaaggctatgccggcgtgcttcgcgacgtatgcggactcgaagaggatcattctttattcaaactggtaatcagccatttgaaagcatagctttagatagaatcgggagagggcggcagccgggcgggggctgccgaaaacagaatgtatgaacagggcggcgcagatgcaacctaatctagaaacatcagctgtgagctgatgtttcttcacttcttgaaaagtatttgcacagattttaataaaaaattaattagtttgaattgaagattttttgacagcgttttatgatagggataccgtttcaaccgccggaacccctttcacccccccccccccgcaaaaacgacaacaccggaggcggcgttttatgtatatgacagcaagggaacaaaaactaatgaaataccttttgcatcaaaaccgttatgtcaaagtcaatgaaattgccggctatatagaagtcagcacaagaacggtccaccgcgagctcaaagcggttaaatccgttctggacaagtacaggcttcagcttgataagcagccgggaaaaggcttgaaactggtcggagcctacagagacaaacagcggcttcttgaagatctgtcccgggacagtcatgtcgaatacagtgccgatgaacgaaagcttttgattttatgcgcgatgcttgaaacgggagagccgatcaagctttatacaattgcccatgacttgcaggtgacggcggcaacgatcagcaacgatcttgacgagctggagaagtggatcgctccattcggcctttcgctgatcagaaaaagaggctacggtatagagctgagggggccggaggacgccaagcggaaaatcgtcggaaacttgatggccgacaagctcgatgttcagcagtttctggaaacgatcgaaatgaatattaaaggcaagaacgaagcgccggagaaaatattcggtgtcgtcagccgggggaaattgctgaaagcggaaaaagtgctgtttcagatgaaagaaaagtatggactttctctttccgacagtgcatacatcgctctggtcgtccacttgacgtttgcgatcgagcggatacagctcggtgaaatgatcaatatgaatgaagaagaattgacggatctgaagcgtacgaaagagtttgaactggcgcttgcgcttgcaaaggcgcttgaagatgcgtttcacgtgaagatacccgaagctgaggcggggtatattacgatgcatttaagaagcgccaacaaaagcttcaaaatcgactacagagcggaagatatcgagctggatactgcgctcagaacgaaaaagctgatcgatttcatctcgcaaaaaacgggcatgaatttaaccggcaatcattcgctttatgaaggattaatcgcccaccttgaaccggcgatcatccggatcaaagaaaagatgtcggtgcataatccgttaacagagcaggtcaaaaaagattattttctcctatatatggccatagaggaaggcgtcgaaatatttttcccggaaatccggtttccagatgaagaaattgcttttatcgtccttcactttggatcggcgcttgagatgagcaaacaaaaagtagacatcaacgcgctcgtgatttgttcgagcggaatcggttcatcaaagatgctggcctcgcggttgaaaaaagagcttcctgaaatcgcttcctttgagatatcctctctgatggaactgaagacgaaaaacactgatgcctttgacatcatcgtttcaaccgtgccgatcccatatgaaaacattgactgcgtcaccgtcagtccgctccttgacacggaagatgtgaaacagatcaaacaccagctcacccgaaaaatcccgctcatccttcggaaaaagcggatggcgcccaaaaaaccggagccgtttccagatatgcttcagattgcgcggaaaatcggccattacgcggccggcattcaacatatactgagccattttacggttgaaacgatggaagctgaatcaagcctggaacatacggtcaaacggatttgcggaaccctggaagatcaaggcctggttaaggatgcagggcagatggcggatggactgatgaaaagagaagcacagggtggcctcggaattcccggaacaaccttcgcgctgtttcatttaaaaagtgaagcggccgcggttcccctctttaaagcttatgatctgtccaaaccgttcgagatcaaagggatggacggaagcgccatgaagatgatgcggatgctcatcatgctggcgccggccgatctgtctccggaaggttccgagattctgagcttcatcagctcttcgatgatagaaagtgatgagagcataaaagcataccagaccggagaccgcgagcagctgtacggcatgctgaacgtgctgtttcaccggtttatacaggataaagagtggtgagagccccgggttaacccggggctttcttcatttttatcgcacatggtcatgtttaaacaaaaatttctccggttaaaagtctagtaacatcagctaaagggaggaatcacaaatggatttgcgcaatcagcagacaaacgggcagccggcgcagacgcaagaccgccagcccggcatcgaaagcgtcatgaatccgcgtccgatctatgaggatgaaaattacaaaggaacggataaactgaaaggaaaggtcgcgctgatcacaggaggcgacagcggaatcggcagagctgttgccgttgcctatgctaaagaaggcgcggacatctcgatcgtctacttgaatgaacacgaagacgctcaggagacgaaagcgcgcgttgaaaaagagggcgtcaaatgcctgctgcttcccggcgatgtcagggatgaagctttctgcaatgacgcggttgagcagacggtgaaggagctgggccgtcttgatattcttgtcaataatgcggccgaacagcatcctaaagacagcattaaagagatttccagtgaacagctcgagaaaacatttaaaacaaatttcttctcttatttctactttacaaaaaaagcgattgattatctggagccgggcagcgcgatcatcaatacaacatcgatcaacccttaccggggcaatccgcagctgattgactacacggcaacaaaaggggcgatcaatgcgtttacacggtcgatgtcacaggcgctcgtcaaagacggcatccgtgtcaatgccgttgcaccgggaccgatttggacgccgctgatcccgtcaacgttttcaggggaggaagtggcgaagttcggtacagatacaccgatgggccgtccaggtcagccggtcgaccatgtgggctgctatgtgcttttagcatctgacgattcttcgtatatgacagggcagaccctccacgtcaacggcggagactttatcacgacataaaagggggaagctcgtgtgaaggtgacaaaggaagatgtaattgaatactacgagaaagcgggcattgtgctgaacgacgatgataaagaaaacatccaaatcatggactacggattaaataagctggataagctggggcttcagctgttcgtctatgtcaacacagaccgctactgcgccaaagagctcgtattattccctgaacaaacatgccccgaacaccggcatcctcctgtagacaagcagaaagggaaggaagagacattcaggtgcagatacggaaaagtgtatttgtatgtagaaggagaaaaaacggaagccccggccgttatgccgccggacgaggatattgaacatttcaccgtttggcacgaaattcagctcacgcccggcgaacagtttacgattccgccggacacgaagcattggttcaaagcggggagtgaaggtgcggtggtcacggagttttcttcaacaagcaccgatgatcacgatgtgttcacagatccgagaatttagcgaatgggagtccatctcattcgctttttttcgctcgctccatcacatcaaagccgatgaagtgccgtccgtcatgatcggcaaaataaaattgaacaccgttcacacaaagtgttttgaccgcttcctgtgccgtcggtcgaaaccgccgaacgtgcgtcccgtttaggtaagccggttcaagtttatattttctgccggtcagcgttccaagccgcgcgatttccggagcctcgtcccccggaaattcgacaccgatgatccgctgatggcggtcaaagtctgcagacaaagccgtgtcgccgatatcatctgttgctgataccgatccggcccgcctttccgttaaagcaatgtagcccatatcagcctcggcatcaaacgatatgaaaatattcacgtcaaaaacctccattcaattgtttaatatacaagacattgtggaaaagtaacagtggagacgatacaaaggagggaacctcaaaatggatcagcagcaattgaagaacaaggtgcttgatattctcgatcatcataaaatcggttcgcttgcaacggttgaaagcggcaagcctcattcccgctacatgacctttttccatgacgggctgacgctttatacaccgacaagcgatgagacgcacaaggcggaagagattgataacaatccgaacgtccacgtgctgttgggttataacggcgaaggattaggcgatgcataccttgaaattacaggtacggcaaagctcaaccattcaaaggatttaaaggacaaaatttgggatgaaaggcttgagcaatggtttgacggaaaggacgatccgaacttgaccgtgcttgagattgagccttcggaaatcagactgatgaatgaaggcgaaagcaccccggtcacgcttgacatgtagcactgtgctcaatcagtttgtcataaagggcgaactgtagtataataaaaaacaggaacacgcaaaagagcaaataaatggaaagtaaacttcttttttctttcttagaagatgctaatttcttcctctgacccgcccctaacaggatagagggaaaaaagactttttgtttcacaattcacactggcgcggcttcggagccgcaaggacgaatgagaggtagggctttcgttgtcttgtatcagaaattccatggtgtttactttcgctcggaacgatagatgctgatcttttacgaaattcaaatgaccgcctttggcagcggataataatttatttgctcgaataaatatgataattgagaccgcttcggcttttgccggagcggtttttgatttgccgaaacgtttccgttttaaaaacagtcttacctatagactggaggaaggtaaatggactttttaacatccaaggtgctattgattttttgttttctgttgttgatccattccatcgaaacgctcgcttacgctgcccggctgtcaggcgcgagagtcggatttatcgcatcggctctgtcattatttaatgtgatggtcatcgtctcgagaatgtcaaacatggttcagcagcctgtgacgggaaagcttgttgatgtcgcgggggcggatgcgctttccctcgtcggtagccaatttcggtttttgatctttggttcaaccgtcggcacaattttcggaatgctgcttctgccgacattcgtcgccgtattttcgagagcgattgttcatttggcaggagaaaatggctccgttttgcaagtgtttcgcaaggcgttttcaaaaaatagcttcaagcatgcaaagcattatgcaaaaagaccgagcctggaatatgtgaaagactttcggttccgctatataccgaaacggctgtttgtcttgaacatggtcattacggcgatttatacaatcggcgttcttgccgctctttatgcgggcgtccttgtgcccgaaaggcatacgaccgcggtgatggcctccggccttgtcaacggggttgcgacgatgctgctcgcgctgtttgtcgatccaaaggtgtcggtacttgcagatgacgtagcaaaagggaagcggagctatacgtatttgaaatgggcttcgatcacaatggcagcatcgagggtggccgggacgatttttgcccaagtactatttattcccgcttcttactatatcgcatggatgacgaagtggatgtagtcgatttttgacgaaaagatcaaaattcgataattttcattacattatgaaacaaatgaaaacaaaatattatctttttcgacagggttagacagcttgatctttcttttattaattgcccgctgtttcatcctgtgatagtcttatgtgtggcggtgataaaagtggagagggttagagtaagagtaagaaaaccgaaaagaaaaaggcgaaaaatcataaagcgcctgtttacattaactttgctggttatcatagcagcagcgggttatacctactttgaatacaaaaaaggcttatctgaatctgacggagattttaaagaagacggacagtttgaatttaacggggaaggctctgatcttgatgaagtgaacatcctcgttcttgggatcgattcaagaggggaagaccattcaaggtctgactccatgatggtcatccactataataaaaagcagaaacagcctaaattgatttcgattatgagggacagctatgtcgacattccgggatatgacaagcaaaaagtcaatgcggcttatgcatacggaggcccggaactcgtcagaaaaacattaaaagaatcctttgatttggacattaactattacgctgtcatcgattttaaaggttttgccaaaatcgttgatgcggtggcgcctgacggcatcgaagtcgatgttccgaaaaaaatgtcatacggaatcggcatgacactgcagccgggaaaacaagttcttcacggtgaaaggctgctgggctatgtccggttcaggcatgacagagaaagcgattttggacgggtcagaaggcagcaggaagtcttttcaaagcttcaaaaagaagcggtgagcatcggaaatatcgcacagcttccgaagctgtgggggctcgtcgatccgtatattgaaacaaacattccgaacggcgtcatactctccgtcggcaaagactttttgcttggaagcgtaaaagaaaccaaaagcttcaggctgccggttgacggatcatttacgaacaaagacgatccaaaatacggggcagtccttgatttagaccttgaacaaaacaaggaagagctgaaacgctttttaaatgagtgatcaaaaaatccgccgggaaacccggcggattttactgatcatatttttttagtccccggtcataaaggaaattgccgaatggaacaaatgcggccacaagaccggcagccggccatttcacagaccacctcagcacaaaagttgcatacaacagaacaaacaaatacaaaataaacaatccgccgtgaaccgatccgacaatcgtaacggccatcgggtaatccgcccaatatttaagcggcatggcgatgaacagcaggattaaaagcgacatgccttcaataaaacccatcaaccgaaggcggccaatcggcgtttgcagcatagtatacctcctgtggagtgatagtctacctttatactataaaccaaaaggggacaaatatgacaggtttttctccgattgatttatgcgtctgccggaagcttcattaaagcgccgaagtattgctgggcagtcgtaaaacaaataaatgcggtcaattccgttatttcttcttctgaaaacacttcttttaaaacatcaaactgcctgtctgacacgcgctccctctgcgccaaaaagacctctgcaaaccccatcgcaaagctcgttttctgctgattcggaatctcgggcttccccttggccttgcaatattcacacccgtttccctgagccagcacacggcgcacctgctccttcagttcctttgataaaaagccgtctcctgacagctcctcagctaaagccgtccagcttgacatcaggctttcagagtgtccgagcagccgctgaaacggcgtctctcctctgtctgaaaaattgattcttgtcatatgatgatcacctcttcataatcatatataagcagaagagaaatatgaatttcgaacgaaagaattttcgtgaaaatattaaaataatgaaatagaatggagggaataaagttacatatgaaaattgatgatctcgattttaaaatcatagccgaattaaagaaagacagccgtttatcgatgcgggagctgggcaggaagatcagcctttcggcaccgtctgtgaccgaaagagtcaggcggctcgaatcgttcggcgtcataaaaaaatatacgctggacatcgattaccaaaaggtcggtcttcccgtttcctgcatcattgaagcaacggtgaaaaacggggaatacgagaggtttaaagcgtatatcgaacgcctcccgaacattgaattctgctaccggatcgcgggagctgcctgctatatgctgaaaatcaatgcagagagcctggcgaagatcgaagcgtttatcaatgaaacgtctccatatgcccaaaccgtgacacacgtgattttttcggaaattgaaacaaaggaatcgtgaacattagagatgcatctgtatcatctgttataatataaggatgcatgaacaagaaagtgatgtgatgatggacgtgtctaaaacagttgttttagcagaaaaaccttcagtcggccgtgacttggcccgcgtgctgaagtgtcataaaaaaggaaacggatatcttgaaggcgaccgctatatcgtgacatgggcgctcggccatctggtcacattggcggaccctgaaggatacggaaaggaataccagtcttggcggcttgaagacctgccgatcatccctgagcctttaaagctcgtcgtgatcaaaaagaccggaaaacagtttcaggcggtaaaatcgcagctgatcagaaaagatgtcaaagacatcgtcattgcaaccgatgccggccgggaaggcgagctcgtcgcccgctggatcatcgaaaaagcaaaggtcacgaagccattgaagcgtctgtggatttcatctgttactgacaaagcgatcaaagacggatttaaaaacttaaagaacggcaaagactttgaaaacctttaccattcagctgtggctcgagctgaagccgattggatcgtcggcatcaacgcgacgagggcgctgacaacgaaattcaacgcccagctttcctgcgggcgcgtacagacgccgacgctggcaatgatcgccaaaagagaggaagatattaagaactttaaacccgtcccttatttcggcttgcgcgcagcggtcgacggcatgacgctgacatggcaggacaaaaagacgtcacagacacgcacgttcaacgcatctgtgacgtcgcagcttgcaggagcgctgcaaggcaaaccggccgtcatcgtcgacttgaaaaaaacggcgaaaaaaagctttgctcccggactttatgatctgactgagctgcagagggacgcccataaacgcttcggcttttccgcaaaagaaacgctgtccgttttgcagaagctctatgagcagcacaagctcgtcacctatccgcggacggactcaaggtttctttccaatgacatcgtcccgacgctgaaagaccgtttggaaggcatgcaggtgaagccttatgcccagcatgtggcccggatcctgaagcggggggttaaagccaataaaagctttgtcaacgatgcgaaagtatccgatcaccacgcgattattccgacggaagagccgcttgcgctcggcgcgttaagcgaaaaggaaagaaagctttacgatttgatcgcgaagcgcttcctcgctgttttaatgccgccgtttgaatatgaagaaacaaaagtgtttgccgaaatcggcggagaaacctttacggcaaaagggaaaacagttcagtcgcaaggctggaaagcggtgtacgatttcgcagacgaagatgatgacgaggaagaaaaggatcaaacccttccaaaactcgcaaaaggcgacacgctttccgtccggtctttgacagagacgaagggtgaaacaaaaccgccggcgcggtttaatgaaggaacattgctgtctgcgatggagaatccagccgcatttatgcagggagaagaaaaaaaccttgtgaaaaccctcggagagacgggcggacttgggacggtcgcgacacgcgccgatattatcgaaaagctgttcaacacgttcctgattgagaaaaaaggaaaagatatttacattacttcaaaaggaaaacagctccttgagcttgttccgtcagatttaaaatctccggccctcaccgccgaatgggagcagaagctgtcaggcattgcgaaaggaaagctgaaatcttcagccttcattaaagaaatgaaggagtacgcaaagcagacgatcagagaaatcaaaagcagcaatcaaaagtttaagcacgacaatatcacaggaacacattgccctgactgcggaaaactgatgctgaaagtaaacggcaaacgcggcacaatgctcgtctgccaggacagggagtgcggccatcggaaaacggtcgccaaacagacgaacgcccgctgcccggtttgccataagcgcatggagctgcgcggccacggggaaggccaaacctttgcctgtgtctgcggccaccgcgaaaagctctccgttttcgaaaagcgcagagccaaagacaaaaattcaaaagcgtcaaaacgcgatgtacactcttacatgaaaaagcaaaacaaggatgagccgatcaacaatgcgctcgccgaacagctgaagaagctgaagcttgatcaataaaacgggaagcctgccggggacggcaggctgttttaatttgtccaaatatcacaaaaagctgctgttatgacgcgatgatagaaggagattcactgcgcggaaaaaaccgggaaattcatgtagccgcgcccaggaaaatcggattgaaacatgaggatattctggatgccgatcaatgttgaaatccttgtcagccgctcttgtataaagaccgactccgcctttggaaaatcgccccgcacttttgtggcaggggaattttagcgaagttgagcacagccggaaaacgaagcatgatatctcgattttctcttttgctctgccgggtttaagaaaagaattgatgtacaatcaataggtcagaaagcctgtctaccgccggttttttttatattaaaaaagtatttacaatgctcgtaaacgggagtatgatctctctataataatccaaaatcgcttaatctaaaaaagagcgggggaaccatttagaggcgtacagcctccggggtgaatccttttaaaggtagggcaaactctcgtgagcccgaatccgtcagctaacctcgtaagcgttaagagagagggagataacctgggaataaaaatccgattccgcaggggcttttgcctctgcgcttttttgtgcgaaaaaatactgaaaaaacagcaaagaaggagaagacaatgatgtatagtgcaataaagcggtttttaatcgggaagccattgaaatcaaaagagcttagagaacaaaagattacaaaaacaaaagcattggctttgctttcctctgacgccctgtcttccgtcgcttacggaacagagcagattctgatcgttttggcggctgtcagttccgccgcattatggtattctctgccgattgccgcaggcgtcatgattttattgacggcattaattctttcataccggcagatcattttttcttatccgcacggaggaggagcttatgttgtatcaagggaaaaccttggagtgaacccggggctggtcgcaggagggtctcttcttgtcgattatattttgacagtagccgtcagcgtttccgcgggaaccgacgccattacatcggcagttcctatgttgcatccgtatcatcttctgatagcgattgtgctggtgcttttgattatggttttaaatttacgagggctgacagaatcggcttcaatattggcataccctgtgtatttatttgtggccgctctcttgattctgatcgcggcaggcagctacaagctgcttaccgggcaaatcgagccggcggagcatgctgcagtcggcacgcctgttgccgggctgtccctgtttctcctgcttaaagctttttcttcaggctgttcggcattaaccggcgtagaggcgatttccaatgcgatacctgcttttaaagatcccgcgccaaaaaatgccgcaaatacccttgcgatgatggggatattgctggctgtcctgttttcggggattacaatgcttgctttcggttacggcatcacgccgaaaagcgaagagacggttgtttcgcagattgcatcggaaacattcgggcggtctttcctttactttttcattcagggcacgacttcaatgattttagtgctggcggcaaataccgggttctcggccttcccgcagcttgcgtttaatttggcccgggataaatatatgccgagaatgtttacggtcagaggagaccgcttagggtattcaaacgggatcatctttctcggtattgcatcgattgtgctgattgtgctgtttaacggacagacggagcatctcattcctttatatgcggtcggcgtgtttataccgtttaccctttcgcagacggggatgtgcttgaaatggatgagggaaaagccggacggctggattgcaaaaatgatcattaatgcagcaggagccgccatctccgctgtcgtgctgctgattttattcattacaaagtttgcgcttgtttggccgattgtcatcttcatgccgattgtcatttgggccttttatgtggtgaaaaagcactatacagcggtgagcgagcagctgagaataacaggcaagcctttggagccgatcaaaggaaatatcgtcattgtacctgtcgcgggtgtgacaagcgtcgtcgaaaagtcggtccaatacgcaaaaaccttgtcagatcaagtgattgcggttcatgtatcatttgacaaagaagaagagaaaaagattgagaagaaatgggaggctcttcaaaacggggtcaggcttgtaacgctttattcctcataccgaagcttgatccacccattggaaaagtttctggaaacagttgaagccaaagcggcgagctacaactactctgtgatggttctcgtaccccagttcattccgaaaaaaagctggcacaacattcttcacaatcagtccgcgcttttgctgcggctgaggctcctgtggaaaaaagacatagttgttgccacgcttccataccattttaaaaagtaaaaaacctgcagagccatgctctttacatgccgggtttttgctttattcaggctgcttcgcgtccgcttcaagccgggccactgctccaggcgacgctttttccaccgctctggcggctatgtcgtaagcctcttcatactgatatgcgtaaaaacagttttctgcttctttcagctgttcggaaaggatacggtcctggcttctgaagcggttgccatattgaatgatgcgttcgatcagcaaaaccagttcaaccagttcgtccgtctttgttttcacttccgtgacaagctgttccgcctcttgaagacgttcgttcaccgcatccatgttcagcggcagctcattcaactgttctgtcactttctgcacagtcgtctgcgactgtcggatcttttcggttatggcctccgggatgcctggaacattgcttttctccaggctgcgcgccgtatccttgattgtctgcttcaattgcttgagaagctctcttgcctgaagctcttcttttctcagcatttgcagcatgtccctgtattcgtcatgctcccgttgcgcggcttccatctgcttttcgatatcggcaagctcttcttttaacagcgagtaggcgacatgtttctgatcaagcctttctctcacttgttcgaactgcttttcgatcatttcaaggcgcttttcatatgactgctgcttctccagttcgccggtagtcagtctgtagcctttcttgacgagctcggtttcagcttcggtatcctttttggaggcttcaagcttttccaatgcagcggcaagctcaggcactttgcccaaaatttcctgccctgcttcgacttcatgctcgagctggttatacagcgtctggatcgtttcatcaatgatctgcacgattgcggcggcttcctctaaatcaagctcgtccaaaagcgcatcttcagcgcgcttcaattctttcaaaaggttttcgagctccttctccacttgaatatgatcgagcttataccctttatcgatcatttcctgatagccggctttcaattttgcgatttcctgcggaactgtctgcttgcagctggcaagcagtttcggcacatcgtctatgtatgattgaagctcttcaagcaaacggtcttgggcaagcagcacctttctggcttctatgtaatttccgccttctgtttcctcttcaaactgtttaatgccttcccacacggtatcgaggtcggcttcaattttcgcatagaggtctccgtacaggtggctgtatgccaaaaggtttttccgcacttttgtataacgttcttttacctcttcgatttctttgcggttctgctcttcgcttgagacaagatcggcgatttcctttaagatgtcttcaatgttggactcagccgctgataaaagattctcaatatgcgcgagcacctgtttcgatttttgaaaacggtatttgtcggcgcaatcctcggcttcaaacagaagctcttcgactttgggcatatgcgaggtgacgatttcatcccattcccggcgccatctttcaaagaattcctcagtctgccccgtcattttcagatgcttgatttttgacatctcttccacaatcgaacggttcatgatttcgattttccaagcttctaaacggtcgatctctttatatatattttttctgaataagtagcccgtagcgaataagattaaaaataacgccagtaagccaatgacaaactccataatgagcccccttgctgtttatcttgttctgtcagggtatgatatttgaaattgttatgtaaaaatgaagttaaactatcgttttcattgttcttatgataccatgtaaccaacattttttgagcagaatttttaatttttttacatcaaagtgacaacatctgactatttttttacggggtgacatcatgctgaaacgagacggtcatgttcattctcccttttgtccgcacggatcaaaagacgaattcagatattatatagaagaattgtgcaaaaaaggcttccaatccgtatcctttactgagcacgcgccgcttccgccttcatttattgatccgactccggagaaagacagcgccatgccgatctcccagctgggccgctatattgaacggctgaccgaactgaaggaagaatacagaggacagcttgacattttgatcggtcttgaagtcgattatatccgcgcctttgaacatgaaacgaaagcttttctcgatcagtacggcacacatcttgacgacagcatcctgtccgttcattttttgccggctggatcttcatacatctgtcttgactacgatgaaaaagcgtttcagcagctgatcgactgctacggcagcacagagcaggtttatctcgcctattatgacgaaatctattcttccattgtatcaccgttgggagcatttaagccaaaacgaatcggccacatcacgcttgcgaaaaaatttgtgaagctgtttccgtatacgatgtcggaaagcgttagaaaatcggtctcctcctgtctggatgaagccgcaaaacgcggacttgaacttgactttaatacggccggcctccgcaagccttatgcaggcaacgtctatatggaagaatggatgataaaagaagcggaacaaaaaaacatcccgcttgtctttgggtctgacgcccaccaagcagaggatgccggatttggttacgaacattttgagagccgctttgttaaataacggcggcttgccgacgctctctgtacaacagactgagaagccatgttttgacttccttgtaatacgcctgataaaagtacggctcgtgcggctgtacataaagcacttctgaaatatattgaggctgcagataaggcatcattaaaagcgacttcagctgaatcataaaatgggaaaggggaaaacgggaaaattcgttgtcctcatttcccttttcaatgatcagatggagaatgtacttttctttcgttaaatatgtcgacatcacttcacgattcagtgtggaatcaatcgtgacttcgcgatagacaaaccgagttaattgacgatgttcatgctgatacgatagaatatcaaaaaccaattgaagaaggcaatccgttgcacctgcatcctgaaggcgttcatggcccttttcaaggattcttaaatatccttcataaaaacgggatactaaatgctccattaacccgccttttccattaaaataataggagatgtgggcgacattgacattggctgctcgggcaatttcgcggactgatgttcctgaaaaacctttttggttgaacagttccacggcagattcgatgatcctgtccttcgtggttggagtagcgtttgatcccatcttgtttcaccccttcttacttaaaacaattccacttcaagcggagttgttcctgtaaaaagcgctcgacaaatagcatcacggcaagcgcgtttttgccatttcaaagaaaaagcgagggaaatataatgtttcatgtcgaaaaaacagaaggcagtaaagaaaaaaaatacgagcttctcctcaaacagatcgatgcgctgacagaaggcgaacctgatatgatcgccaatacagcaaacgcttccgctcttttgtatcaatcattggaagacgtcaactgggcgggcttttattttgccaaagacggtgagcttgtgctcgggccgttccagggacttcctgcatgcgtaagaatcccgttcgggaaaggcgtctgcggcaccgcttatacaaacggccgggtcgagcgcgttgaagatgtgaacgcattccccggacacattgcgtgtgatgcagcgtcccaatccgaaatcgtagttccgcttgaagttgacgggagcatcatcggagtgctcgatatcgacagcccgattaaaaaccgcttcgatgaaactgatgagtattatttgaaaaagttcacggagaagcttggagagcgtttaagcgaaaagagccggtaattccggctcttttttaatgtgtcataaacttgtttttcccgttccgctttgcattgtacagcgcgacatccgcttctttaaaaaggtcggataaagatttcggacgatcctgagaccaatgggataccccgcacgaaatcgtcaccgtcggatccgtacattccctgacaagcattatgagcctttcggcaagcatttcaccggcgttcagccttgctttcggcaagtataccgcaagctcttctcctccccaccttgctgcgacatcctgatcgcggatgtttcgctggatcacccgggcgacttgtataagaatatcatcgcctttctgatggccgtacgtatcgttaatctgtttaaaatcatcaatatcgatcaatacaaggacgccgctctcgtccaatttcatactgtacccgattttctcatcgagatggcttctcgagtagagctctgtcaaacggtctgtctgaacaagatacttcagccggtcgcgcagcatcaaattcgatacggcgagcgtggaatgcctgatcagcgtctgaaacagcttaaacatctcaaacgaaaaggagcagacattttttttcaacacgatgacaaatcctttgttttcattattttccagcatcggaacgcccattaatgaagcatatccttcattcccaaaaagcgaagaaccgtttccgacaaacaccccgttttcctctgatatcttctctttgacatagcggatgtatggaagggcctcatccgtctgaaaaaaactagtgctttccggcagcagggtttccttgcctaagtgatttttataaaaaaagcccacctcttcggcgccgaatgaactgatcagcctttcggacaagctcttcatcatatccggaaggcgtttcgtccggttcagctgatgcgatgtttcattaatcagctccaaatttgaaatcatattctgcgactgttcgtaaagccgtgaattttcaaatgctttccctgccgcattcgaaataatgcatatatccgctgccgtatcggcagcgcctggtccaaaggctttcaaaacgccgtacgttccctgccggcctttaatcggaatgtatacttccgcttcatttttgctcttctcctgtcctgataagtatgcctccaaggcaaaagaatcggtcgattcgctttgcacatccaactctatcgcagggaggttgatgtattgatcctcatcgtatgacaagaaaagacaatacgttaaaaaaggaaacacactccttaagctttcgagcattgtcttcagcacctgctcctgatccatcagctcatgcagcagctccgtcttttcataaatctttgttttcttaagctcatcacgaaataatgcgtcaagctccagacaatgcaccaaaaacagatgaatggattccgcgagacgttctggtaatttatgtttcttttgacatgaaagttctatatatttgctgttttcttctattgttataatggtatgataatcgctcactcggctgatcggatcaccgtcgcctctcgatccctgcagtcttgaagaaggctgcactgttagagatataaacgaaaaaaatgactctgctgccgcttttagccaggcaacagagtcgtcgtacgagacggccggcttttttaaaaaaaattgaaacagcttttgatgaaaagacagatataggtcttcagtttgtttattcatggtcatcaccttaaaaaatccgttttttgtattttattttcctgattatatcacaaaaacaggactatatacttataaacagtccgtccctttcgggacgatccatgaatggttgactttgcccggcggacattatataatcttctttgtgtgaaataatgcagcctttttgttctgcttctatgtttcattttgttccttatttattaaggtgtatcgtgtaactctttgctgctggagcgaggatacatgaaaacaaaatggacatggctgaattgaacagatgggttttattttcacaaaaataaaaccaaaggaggagtcacattatggctcgctatacaggtccaagctggaaattatcccgccgtttaggcatctctttaagcggtacgggtaaagaattagaaaaacgtccttacgcaccaggtcctcacggtccgggacagcgtaaaaaactatcagaatatggtttgcaattgcaagaaaagcaaaagcttcgccatatgtacggtgtgaacgaacgccaattccgcaacctttttgacaaagctgcgaaaatggccggtaaacacggtgaaaacttcatgattcttcttgagtcacgtcttgacaacatcgtttaccgtcttggcctggcgcgcactcgccgccaagcacgccaattggtaaaccacggtcacgttcttgttgacggaagccgcgttgacattccgtcttaccaagttaaacctggccaaacgatttcacttcgtgaaaaatctcaaaacctttctgtcgttaaagaagcggttgaagtgaacaactttgttcctgaatacctgacttttgacgctgaaaagcttgaaggttcactaactcgccttccagagcgttctgagcttcctgctgagattaacgaagcgctgatcgttgagttctactctcgttaatagaaaatgctctttaaagagcatgggcaaaaaccctagaattgttgacatcccaacgattctagggttttttgtttactccccgttgattctggctgctgatagatctgatgattcactttcaaatgatatctgtgatcacattcatcctggttcgaaattcgcccgccgaaataaaacagacccgcctcataagagtaaggtaccttctcacaagcaaacatctccttttctcctttaaacatcttcggtaaaattaaatcgttggttagacaatgaaagcggaggagtggccgacaaatgcttttgttttttgctaagtttgtcttgttctacgtattctgttcagttgcattcgcccttttcaaagtcatgtactacaatatcagcaaaaaatgggttacaaagacggcggagggcactaaactgaattgggctttgaatgtctttcttaaacacggcaaaaaaatggacagcaacgactgctttgttatgggggttttagcgggatggtgtgcgatttatttataaaaagcttccgaaaaaggaccgagatccgtgtcgcgatgcagccacaactgaacttcagcgactgcttttatttagtctcgccgatttgactgttctccggtatcaccatacgatcctcaatcgctgctgagagtgataccgccaaacactcttcggtattgctggcacattgaacaaagctccgatgatattattgaagggttgctcaataaaattaaaaattcaggtctgcttcagtatataaaaaaaccccaatcgccagatgattttctaacaattgggggccaatttacgatacatttacttttggatttggtccatattgattttcttttgcttcgccagcctgacagtaaaaaataagcagaatgacagcaccgataatcggcaaaaagccaattaaaatccaccagccgcttctcccggtatcatgcagcctgcggacattgacagccaaagaaggcaccaaaacagccaactgataaataaagatgagaatgtatccgaggaaccccccgccatacccaatgatatatcctacttgatatctgtcatatccttctgctgtcatgattcctgaaataaataaacttactaccattaatgataagataaataatataaagcatatgatgccgttaaatacatgaaacaaccagtattcctttcgtcttgctctcccttcaaaattcgcataattcttcaagcctctccaataccacttcatacaatttcctccactgccaaatctataaatttgcgaaaaacatatgaattataccataaaatatcattttcgaccatttacttgaagggatgttttgatgcctgttcggaaagaacattttttctatgggctttgagcttacattcatatcataggaaaaacaatatacagtttccatttaaccattgcttctgtataatatgaatcattcatttcgcctccgtagctctagaagggaagagcgccgttaaacattgtaggaacgggtcgcaaggcaagggtttcagaagcaccgaaaagcaaatagctgagacaggtggaattcctgtcggtgaaagtccgtagggaagcgtgttctcccctagcctatgcttacggaaggagtgcgggttcgaatcccgccggaggcattgattacatctctggtctcgaagaagaattaaaaaacagacagaagttcactgtctgttttttacggctttgacctgtcatatattaaaatgtgtaagattcgccgtcatccggcacaagtacgcgcgaggacattcctttttcctgaatgaagctcttcaattcttttcgtgataaagtccaatggttgacagcctccatatgactggaaatgattgtggtcttaggtgcagcttgatagacttcagcaatatcctcttttcccatcacaagagaccctccttcaaagaactgattgtctcctccgttaacgactatgacgtccggctgatgcgcagcgatttcttcccggacaccttcataccaaactgtatcccctgccacatacagcgttttctcctttgagtgtttgaagacaacgccgcacacttctccggcaagctttaatatctctcccctcccatgctcgccttttgttttgattaattgaatcccctcaaacaccgtatcttttgttaagacctctatattttgaaaaccggcttttctcacttcctcagcatctgcttcattttggacaaacagtttgatttctttcggaagcagatctttggcagcatcgtcaaaatgatctaaatgcagatgagtgacgatgactgcgtctgtattcttgacgagctcgtcggttggcacaggcaggctgaccaaagggttgttttgctcttgtcttgctgagttcgggaaaggagggtaagcgcctttttcagccagcatcggatctattaaaaatgttttgcccgcatatttgacggccaatgttgcatttcgaatttgttgaatattcatagttatcatgcctttcctttcatttacgattagtttatactatgaccgatcaacatttaaatagataaaatcaagtctttacagcgtttgacttgatttttgaaaaacgttcatttgagaggatttgatgaaatgctggatcatacagacaagcaaatcatagaggaattatcaaaaaacagccggatgaccatgaaggaattaggagagaaagttcatttgacaggtcaggcggcttcagcaagggttgctaaattagaggatcaaggagtgattgaaggttataccatacaagtgaatcaagtgaaactcgggtgttttattcacgcttttatcaatatctatacaaaaagcacttatcataagccttatctttcatttattaaagcacagcagaaatacatcattcataactataaaatcagcggagacggctgttatcttcttgaatgcaagtttccgtcaaatcaacagttggaccaatttttaatagacttaaaccatcatgcaaattataaactgtcgatcgttatcaataaaacgggtgggtaaagagactgccggccgttttattgataaaaaagagggcctctaaagaccctctacttcagccgctttgctgcattttccgtctgattcaattgattgtatccgtcagccgactgctgcacctcttgttttcgttccgtttccagctgcttgtggtaatcttccataaatttttctttggctgcaatgaacaggttcatgctacattcctccctcttcaacgatggaaacgctctacctattacatctatatttttgacatttcctgaatgaacatacatgaaacatgttgacacaaaaaaacccttgccgtttggcaagagtttttttgattacttataagtcagcaggaagtatttctttttaccgcggcgaatgacggtaaactgtccttcgatgcggtcgtcggcggtgaggacgtccgcaacatcggtgcggcgctcgccgttaacgtataccgcgccattcgtgatatcttcgcgcgcctgccgtttagacggagacagctttgattggacgagtatttcaacaagaggaagttcatccgctttctcgacctccagggaaggaacccctttaaagccgacttttacttcttcagctgtcaattgtttgatatctccgctgaacagtgcttttgagatgttgacggcctgctcaaacgcttcacggccgtgtacaagaacggtcacttcttcggcgaggcgcttttgcgcttcgcgtttttcaggcgccgtctctgttttttcagcgagatcttcaatttcttcttttgataagaaagtgaagtattttaagtatttcacgacatccctgtcgtcggtattgatccagaactgataaaactcatacgccgacgttttctctttatcaagccagatcgcgccgccttccgtttttccgaacttcgtgccgtctgcttttgtcacaagcggaatcgtcaatccgaaagcttttgcattctcttcggatttgcggatgagttcgagacctgatgtgatgttgccccactggtcgcttccgccgatctgaagcttgcattcctggtttctgtacaaattcaagaaatcgagagactgcaggatcatgtagctgaattcagtataagatatgcctgtctcgattctggagcttaccgtatccttggcaagcatgtaattgattccgaagtttttgccgacatcgcgcaggaaatcaatgacgttcattttgccgatccagtcatagttgttcgccatgatcgccgggttctcttcagcttcaaaatcaaggaaacgcgaaagctggtttttgattttctgcgaccattcgcggacgatttcttcattgttcagcgtgcgctccgctttctttccgctcggatcgccgataaggcccgtcgccccgcctacgagcgcaatcggacgatgtccggccagctggaagcggcgaagcattaaaatcggcagcaggtggccgatatgcagactgtcagctgtcggatcaaatccggagtataagctgattttctctttatcgagcagttctctcaagcctgcttcatcggtttgctgctgaatcagtcccctgaaggacaaatcatcaagtatgtgtgtcatcatcaattagctccttttttccaaaataaaacgccccttcgcaaaaacgaagggacgataaaaatcgcggtaccaccctgcttaaaagaacgcatggccgcgctcttttcactctcgttgataacggaaaagcttccgttcttctgctacagaaagcccggaaggcttttttcgcaaaagcggttcatgagtgtaattcaaaccatccatatgtgctgattttcaccggccatcagctctctaagacagggaaggatgcgttctactgatctcagtcttcaccttttgaatattcgactaaatcttttttaacataatatttttgcattgtcaatgagacatcagtcttccatcgatgagagatcgcctgccggaaggttcagctcccatgctttcaggacgcgtctcatgatctttccgcttcttgtcttcggcagtttatctttaaattcgatttcccttggcgcggcatgtgcggccaagccttgtttcacgaactgcctgatttcttcttttaacgcatctgacggttcataaccgtccctcaaggcgatgaacgctttaataatttcaccccggacgggatccggtttgccgatgacgcctgcttcagcgacggcctgatgctcaacaagcttgctctcgacttcaaacgggccgacgcgttcgcccgatgtcatgatgacatcgtcgatccgtccctggaaccagaagtacccgtcttcatccatgtaggcggaatctcctgacacataccaatcgcccggcataaaataggagctatatttttcaggattgttccagatcgaatgcatcatcgacggccagccttttttaatggcgagatttcccattctgtaaggaggcagttcatttccctggttgtcgacgattgcagcctctacaccgggaatcggcttgcccattgatcccggtttaatttccatgcacgggtaattgcagatgagctgcgatcctgtttcagtcatccaccaagtatcatgaatccggttgccgaagactttatgcccccacctgatgacttcgggatttaacggctcccctacgcttaaaatatgccgcaaggagcttagattatatttattcacaagatcgtcgcctgcacccatcagcatccggaaagccgttggcgcgctgtaccataccgtcacttccattttttcaatcgtttcgtaccatgcctcaggactgaatctgccgcctacgacaacattcgtagctccattcagccacggaccgaaaatcccgtaaaccgttccggtgacccagccgggatcagcggtgcaccaatagatgtcatcgtcatgcagatcaagaacccatttggctgtttgataatgctggatcattgctttatggacgtggagaaccccttttggcgcgccggtcgaacccgacgtatagtgaagcagcatcccgtcttcctgatccacccattcaatctcaagatcagtgcctgcttccgccgctttcgcgtaataatcaatgacaggtccttcttcctttacgccttctccaacgacaatgattgattcaagatccggaagttcatcggccggcacccgttcaagcaattccggcgtcgtcacgatgaccttcgctccgctgtttgcaagcctgtctttgacggcaccttccataaacgcttcaaataacggcccgacgatcgctcccaatttgatggcgccgagaagaataaaataaagctcgggcgatctcggcataaaaacaaacacacggtctccctttcccacatcggcatgctgctttaagacattcccggctttgttggtttcatttttcatctctctgaaagtgtacttttcttcgcggaccggatctttgtagtaaaatgccactttgtttttcaaatttgactcagcgtggcggtcgatagcttcataagctgcattgatttttcccgttttgtgccatgaaaaatgcttttcggcatccttccagtcaaatgtccggtatgtttcatcatagtctttcaagttgtaatttcccttttctgctggcagcgctttcaatttcatgcccatccccctttgttcgatcatcaaaatatattatagtatagattttttattttctcaatttttaaaaaatactcttctctcctatgaaaacgcttaatattttggtatgttatgtataaaagacttcaactaagatgtaaggcggtggatacgtggagcatcacaaaacttatcatgccaaagaattgcagaccgagaaaggctctgtgctgatagagggccctatcagtcccgaaaaactcgcagaatatgaatttcacgacgagcttacagcctttcgcccatcacaaaaacaacatgaagcattaatcgaaatcgcagggcttcccgaaggacgaatcatcatcgcccgtttccggcaaaccattgtcggctatgtgacatatgtttatccagacccgcttgaaagatggtctgaaggaaacatggaaaatttaatcgagcttggagccatcgaagtcattccggcgttcagaggtcactctgtcgggaagacgctgcttgcggtcagcatgatggatccgcagatggaaaaatatattatcatcacgactgaatattactggcattgggatctaaaggggactaacaaagatgtttgggaatacagaaagatgatggagaagatgatgaatgccggaggacttgtctggtttgcgacagacgatccggaaatcagctcccatcccgccaactgtttaatggcacgcatcggaaaagaggtcagtcaggaatcgatcgagcgttttgacagactcagattccacaatcgttttatgtattaagggagcaaaggggacctgaatatgattgttgaaaaaatcatgaaacgggatgttgtgacactatccagaaccgatacgattgaagaagcgatcaaacgcatgcgaacattccacataaagcaccttcccgtcatcaatgaacggggaacggtcataggcattgtcacggacagggacgtcaaaacagcaagtccgagtatctttgcccaaaacagatctaacgaagatttaaaaaagccggtggaactgatcatgtccaaagaagtgatcaccggtcacccgcttgattttgccgaagaaatatcagccgtcttttttgaacacgaaatcggctgcctcccgatcgtaaaaaacggaaagcttgtcggcatcgtgacaaaatccgatttgctgcatacgttcgttcagctgacaggagcccattttccaggctcccaaatcgaaattaaaaccgatcatatcgcccgaagcctcgctgatatcagcgccatcttcagcaggcgccaaatcgccatattgagcgtgctcgtatatcccggtgatgaagatgattcgaaaatactcgtgtttcgcgttcaaacgatgaatcccgcctctatcatcaaagacgtaaaatccaaagggtatcaggttctttggccggctgttcaaagggatttgccatgaaggacagcgtatttattttttctccctcatatcaaacctatcaatttcatcaagaccacccgtttaatcagctgcgagtctatgtaacatacgatcttttgaacacggtcggcgcatttgaaccgggagaaacgattgccccgcgcgcagcgacagaaaccgagctcgagcttgttcacacgggcgattatatcagggccgtccagcttgcaggggcgggaaagctcccggcagccgaaagcgaaaactacgggcttggaacggaggatacccctgtttttgccgggatgcatgaagccgcctcccttttggtaggcggaacgctgacggctgcagactatgtcatgacgggcaaagctagacacgccctcaatcttggaggcgggcttcaccacgggttcagaggaagggcttcaggcttttgcgtctataatgacagttcagttgtgatacgttacttgcagaaaaaatatcatgcgaaagttttatatattgatacagacgcccatcacggcgacggggtgcagtttacgttctatgatgatccttccgtctgcaccgtctcgatacatgaaacaggccgctacctattcccgggaacggggcaggttcaggaaagaggtcatggcgaaggctacggctatgcttttaatatcccgctcgatgccttcacagaagataagtcttttcttgattcctaccggacggctgtttctgaaatagccgagtttttcaaaccggatgtcattttgtcgcaaaacggagctgacgcacattactacgatccgctgacacacttgtgcacgacgatgaagatttacgaagagattccaaagctcgctcacgaacttgcacacacctattgcagcggaagatggatcgctgtcggcggaggcggctacgacatttggcgcgtcgtaccgagggcatgggcaagaatctggcttgaaatgaaagggatggaaccagaggagaaaatgcctgaaaaatggctgaaaaaatgggggaaacaggcatctgtccggcttcctgccaactggtccgacccggaagatttgtatcctccaattccaagaaaaaccgaaataacggaaaaaaacgcacaaaccgttgccaaagccctttatccgattcgctctgcccagcgtaccacttaatatgaaaattgcggcacacagaaaaggccttgcttttgtgcaagaccttgctttcttctcattattgttttgcgatgacaatctcgacgcgcctgttttccttcatatggctctcagtgcggttgtccctgaccggttttgtatccgcataaccgatggcaagaaaacgcgacgagtcgagcttttccttcgacgtaaagtagccgatcacagtgctcgcccttgctgcagaaagctcccaattggatggaaaacggtaagtcgaaatcgggcggctgtccgtatgcccctccacacgaatcgggttggacaccgatttgagaaggacggcgattttatgcaaaagcgggtgagcttggtctttcagatccgctttccctgaatcaaacaaaaccgcttcctgaaggacgagaatgacgccccgttcgtcacgcttggccgcaatcaaacttgacagttcgtttttttcaatatagtcattgattttctttaataaatcatcttggcttttagccgttttttcagccttctgatcgcccgcgtcttttttcaactctgcggcggatttgccgtcggccctgtcttgaaatgaaccgactgctgctttgaatttgtttaaatcgatttgcgacatcgaaaacagtaaaataaagaacacgaggatgagcgtaatcaaatccgaaaacgtgatgatccagtttggcgatttgcggccctgctcgcgcttccttcgttcatgtctaagcttcatgaggcctgtccttttgtttcatgcggtccgcccgcttttttgtccattcttcttttgaactgaaaacgacaagctgactttcaagatttcgcggatttcttcccgattggatgccgatgatgccttcgatcatgacttgcttcttaaagatttcattctccgtcttttcttcaagcttcgcggcgatcggtataaacagcatgttggctaaaagtgatccgtaaagcgtcgtcaaaagggcgattgccatattcggaccgagcgtttccggcttgttcaggtttttgagcatcatgacgagaccgacaagcgttccgatcattccccatgcaggcgcaaattctcctgctttttcaaagatccttctcccctttctgtgtcgttcttccatcgcggcaatttccgagttcatcacattgcggatcgtctcctcatcccatccgtcgatggcaaggagcaggccttttttcaaaaacgggtctttcatttcattgacattggcgtccaatgataaaattccttgtttgcgcgcctgttcagacaggctgacaaaggttttgaccaattcgcgcacatcatcttcctccgaaataaagacctgcttcagcacagccggcgctctttttaaatctttcggggaaaagctgatgaatacagctgcacacaatccacccgtcacaataaaaaaagacgtcaaatcgataaacgaataaaaaccggaaagccccgctccagagacaacgccgagcactaaaatgaaaatacccagaataaaaccgaccggtgtcagataatcaaatcgtttcattttttcataatctctccagctcaaggaaaagaaagcaagcaattcacgaaaaaagctgtgaacacttgctttctttctcgtttatttaatgatgatcattttgttgattgtctgagttcaatgcgatgcggcagctggacaatatgctcttcgacttcctctttgttcatcagctttgtcagaagcctcatcgccacggcaccgatatcatacgtaggctggacgacagtcgacagctgcggccgaaccattaatgaaagccttgtattgtcaaaaccgatcacttcaaggtcatccggaacagccagtcctttatcctgtgctgcgtgaataacgccgagcgccatttcgtctgtcgctgacaggacggctgtcggtttttcatccagcttcattaaagcctccagcgcttccattcctgaatcgtacgtataatcgccttctacaacatactcttccttaaattgcagccccttatccccaagcgctcttttaaagccttgcagttttttcgcttgattaaccggttcagccataggtcctgagacgaacgcaaggcgcttatggcctttctcaatcagcatggttgccgcatcataaatcgcctgttcataatcgatcgcaaccgacggcgtttcccctttttcttcaacagatgccgcaagcacgatcggaactggcgatcgcttaaattcctccacatgctcttcagtcacatttccgctcataaagacgataccgtcaacttgctttcctagcatcgtattcaaaagatgaagttctttgtccatattctggtcggaattgctcaaaataatattgtacttgtacatcgttgcgatatcttcgattcccctcgccagctctgaataaaagatactggaaatatcgggaatgatcacgccgacagtcgtcgtctttttgcttgccagccctcttgccacggcgtttggacgatagccaagacgctcgatcgcttcaagcaccttctttctcgtcgtcggcttgacattcggattcccgttgacgacccgggaaacggttgccatacttacatttgcttcgcgtgctacatcatatattgtcacattactcatttttaccactccttcaactgggtacacttttcttttcctatagcataaacattttcatgtagagaaatgtcaaaatgtaaaactttatgtaaaataaacagaacaccagtttacattatttttcataacctgccaaaacaaaaggggctctctgaaattatacacggttttacctaatatgaaaacgttccctttatttttataattaatttaaataagaataaacagctttttacttaaaaataagaaattttttcgacaatttttgatgacaacgtaaaaaaaggaccgctcgcgagcggtccataaacaaatcttatgcttttacttgaacgagcggcttcagttcatttaaccatttttcaaatgtcgggatatccatttgctgagctgagtcggaaagcgcgacagaaggatcaggatggacctcggccatgacaccgtcagctccgatcgcaagcgctgcttttgctgtcggaagaagcaggtcgcggcgtccggttgaatgagtgacatccacgaatacaggaaggtgagtttcctgcttcaggatcggcacagctgagatatcaagcgtatttctagtcgctgtttcatacgttctgattccgcgttcacaaaggatgatttgatcattgccctgcgacatgatgtactccgctgcattgatgaattccttcagcgttgcggcaagtccgcgcttcagcagaaccggcttcttcactgaaccggccgcttttaagagctcgaagttctgcatgttgcgggcgccgatttggatgacatcgatgtaatcaatggcttcttcaatatgctgcggattcacgatctcactgatgacggctagatcatactcatcagcaacacgctttaagatttgcaggccttccacgccgaggccttggaagtcgtacgggcttgtacgcggtttgaaagctccgccgcgaagcagtttcaagccttgctttttagctgccgctgcgacttccgctacttgttcgtagctttcaaccgcacacggaccgacgataaatctttgttctccgtcgccgattttttcgcctttcagatcaacgattgtattttcaggctttttcttgcgagaaacgagcagcgctttgctgtgatcgtcttcctgcagttcaagcccggctttgaaaatctctttgaagatatgctggatcgtcgagttttcaaacggtccgtcgttattttcaataatttcgttcagcatcgctctttctctgacaggatcgtagcggttgatgccttgtgcttccttcgcttttccaatctcctgaacgattcttcctcgctcgttaatcagctttaatatttgcaagtttaattcattcgcctgctgcctcagcaaatcaagttcagtgttgctcatggtaatccatcctttcttttaacttcaccctctatgaaaataagaatgattcaattgattagggtttattataaacaatgtttcttaaaatgtcacgaaaaaattctttattacccaaacgcttttaagtgataaagcattatatgcagtttatcccttgctgtgcgggtgtttatcggaagaataaaaaaaagaatcatgtttgattctttaacttgataacctgtatattctctgtattgcggtttcgacgctaaaaaccctgtcattcaaggcagccgccttatcatcggcatgttcgacaatgttctccgtaaattgtccgatgttctcgatgatcgttttcgggagcctctcctgccctcttttcagttcatctatatctgtttcaagccgattcagccgcttgtccattgcgtttaagcggttttctactttgtttaagcgcccgtctatttctttgaagcgcttgtcgattgcgttaaagcgcttatctacttcaacgaagcgtgcgtccacttcatcgaagcgcttgtctatctcaacgaagcgtgcgtcgattttgtctaagcgcttgtcgattccatcaaggcgctgattgatcggactcaattcttcttttagaacggattgaagcatgtcctttaattcagtgttcaactgatcacctcccgttttattaattataacgcacaccaatggatcaaacgatacattttcctaaaaaggcatttccatgaggcaaaagcatcataacaacatagaaaacggccaaaacgctatacgtcttggccgtttttagcagcggattatctgctgttttccgcaagtgcttgtgcggtaatttgcgaatgggaggcatgccatttcacattcccgtttgtaaaaatgaaggcttgaggactttcgtgcttaatcccgtattgctcagcgatatagtttgacagcgggcggctttcctgcacttttaaataataagccggtatgtcttcatgctgattggcgaatgattcgaattcttcaaacgcgcgcctgctgatcgggcatgtcacgctgtgtttcaaaaagataaatgtatcattgttttctgcaagccttttaaattcatcctctgtttgaatgagctgtttcgacacggtgatctccctttccacagttatttctgagcggtatctgctgttttccttgcttcatcttctatttcatttttggcttcttcagcctgttcttcgattgcagacgatgcttcttcctttagttcaccagctttttcggcacccttgcttcgcaagtctttgactttatccataatctgtgaagactggtcggcaacaagctgtgaaatcgaagatgtcttctctttggcgatgctgacgtactcagagcctctctccctcgcttcgcttgtgagctttccggtcttatcctttaaaacgacggcctgatttccaaggtcatcgcgaagctctttccccgacttcggcgctaaaaataaagctgcagccgccccgatgattccgcctacaaacgtgccgattaaaaaatccttagtattcattccgtctttactcatttattattcctccctcatcttcttttgtttccatctattccaaatttccaaagctgcattgctccagctgacaacttgagaaattttttcacggttttgctctgcggctgatgtgacggactgtgaaacctgctgaatggagttgttaaactgcctgaccgatgtgccgacttcctgaacggcatccacgaccgtattcagcttcaaagatttttcctgaatatcatcagcgagccgattcgtcttattcaggagctccgttgtttcagcggtgatgcctttcatttgtccttccacaccttccagcgttgatgcaacatgattaagtgtgacttgaagcgattttaatgtttttgataaatagataaccaaaataagaaagctaacagcgatgagtgcagcgcttaaatacagaataataatcatcttatcctccttcagctaagggcttacaattgatgtatacccaattgtttaaatcgtaaacctctatatttactttttctatacgcacgggtgaattcctttaacagaaactcccgcttcatatgtacaaaaaagcagcggattgactcacactgcctttttcttgttatgctaatacattttcatatgctcttaaatacttttgaatgtcacctgcgcccatgaaaattaacaccgcattttcatgctcctttaaaattgatgtgtcattttcatcgatcagcttcgcctgcggaattttctcctgcaaatcaccgatcgtcagctttcctgcgttttcccgggcagatccgaatatatcgcaaagatatacataatcggctttcttgaggctttcggcaaactcattcaggaatgactgcgtgcgcgtaaatgtatgcggttgaaatactgcaacaatgtcccgttccggatacttctgtctggctgcttcaatcgtcaccgtgatttcagtcggatggtgggcataatcgtcaatcagcacttggctgccggcatgtttttcgttaaatctgcgtttaacgccgccaaaggtttgcaatccttctttaatgatgtcgacatcgacctgttcataatggcagagggcgatgacggccaaagcgttcagaacgttatggctgccgtatgccggtatatagaaagtgtcgtagaatgtgttcctgacgaaaacatcgaacgttgtgccctcagtatttttgatgacatttctcgcctgaaaatcgttttcctcggcaaagccgtagtatacgactggaacgttcgcatggattttcatcaaatactcgtcgtcaccgcatgcgataattcccttgttcacctgtaatgccatcgtctgaaatgcatcaaatacatcatcgatattcgcgaaataatcgggatgatcaaaatcaatatttgtcatgattgcataatcgggctgatagctcagaaaatgccttctgtattcacaggcttcaagcacaaagtactcgctgttttcgcagccttttccagttccgtctccaatcagataagaagtcggttttgcttttttgatgacatgtgacaaaaggcccgtcgttgacgttttgccgtgtgcccctgttacggcaatgctcgtaaacttcttcagataatcgccgagaaatttatgataccgcacgactggcaggccttcagcttgcgctttttcaatttcgggatgagtgtcgggaaaagcatttccggcaataacagtcattcccggcttgatattttccggatcaaacggataaatcgggatatttctctcctctaaagcggtttgtgtaaaaatgtacttttcgatatccgatccttggacattatatccattatcatggagaatttgggcaagcggactcatacctgtcccttttattccgacaaaatgataaacagtcataatagtacctccaacaaacgtctatctgcttcccagtatatgacgcttatttcaatttgcaacctaaagcccggccgcatcgttttcttcaaagtcataattatattcagtatcaggcattttcaagagcgaataaacctcctgcggaaaggatttttttgacccctttcacggaagtgctcttaaaaacggattaaaacgccgctggcggcgctttaatatacggcgctctaaaaaaacacgcccatcagctatcataccatgtttagccgaaaagtgaactactttctattaactgttccagatcagcctttgtaatcaggacttctctcggcttgctccctttcgcttcagaaatcatgccttccctttccatcatatcgattaatctggcagctctgttatagccgatgcggaagcgccgctgcaggcttgaagtgctggcgctgttttgttccacggcaaattcgcacgcttcaagaaacagttcatcgtggtcaaatccggccggattttgtctgaccaattgttcctgttcaaataaatagttcggctcctgctgccgtctgacatgtgaaacgacacgatcaatctcccggtcggacacaaagttgccttgcaggcggaccggtttgcctgaaccattctccaagaacagcatatccccttttccaagaagcttttcagctcccgccatatcgataattgttcttgaatcgacagcgcttgaaacagaaaacgctattcttgttgggatattggctttaatcaagccggtaatgacatcaactgaaggccgctgcgtcgcaatcagaagatggatgccgcacgctcttgctttttgtgcgattcggcagatgctctcttccacttcattcggagcgaccatcattaaatcggcaagttcatcaatcacgacaacaagataaggaagtttttcacccatgttctgttcccggactttttcattaaaacgctcaatttcccgaacaccggaatgagcaaataattcatagcgccgttccatttcctcgacaacccattttaatgcggcggttgccgcttttgcatctgtgatgacaggactgacgagatgaggaatattattatacggagcaagctccaccatcttaggatcgataagcagaagctttacatccctaggcgacgctttaaacagcaggcttactaagatcgtgttgatgcatacgctttttcctgatcccgtagcaccggcaatcaaaccgtggggcatttttttcagatcagccacgacgggctttccggatatgtcgagtccgagagctgctgtcagaggagacggattcgttctaaattccgaacttctgatcatttcgcgtaaataaaccattttgctgtgcagattcggcacttcaattccgatcgtattttttcccgggatcggtgcctcgatccgaatatctttcgctgacaggctgagtttaatatcatctgacagatttgtaattttgttgactttcactccgggttcaggatgaacttcaaatcttgtcacagaaggcccttgggtgacatgaacgacatttgctttaacattgaagttctcaagcgtgacgtccaacagctcccgctgctcgtgtatccagtcctgatcatcctgcttttgcgccggcggcacatcaagtaaagacatattcgggaactgatacccttgaggcgctttttctttttgtttatctgaggcaaacatcatgacattaaacggaacagagcctttcttcgatcccggagcggctcctgcttcccgcttccgcggagcttccggccgatcctcgtttatccttgtagtctcccggttctcttgcctgctttcgggttcacccgcgcttggcgctgccgtttccggtgaacatgacgcctgctcttgtctccagccagtctggcggcttccgcttgtttcttcaagagcgtcagccggggtgtttgaatctgtcctatgggaagattcatcgctctggacggttatttcagaggcgcggccatgagtgtgcggctcttccggaactgaagcttccgggtcgggatgcgttttgcccgaaccgtaagtcttcccttgttcttccgtggcggcttctgcgtcctctgccagtaccatctcttctccggtttcctcaatcttatccaaaagcttttcgatttgttccggtgtttgctcagcggggattgcgtcttcctccgttatgttttgtgatgcggaggcggtctcttctacagcttcatttcgcagcgctttttcctctgcgagtcccgcgccttctgtcattcgctctggacggacttccgtttcttccggaatatgcactgacacaggtgcttctgttcgttcggattcatgccgcagcgctttttcctctgcgagtcccgcgccttctgtcattcgctctggacggatttccgtttcttttggaatctccgtggatgcctgcgggacatcttcgaattcggcgcgcaatgcaggattgcggctctcgcttttgatcagcggacggccgttcttttcagtttgcacggaagcttcttctcgtaccggctgcttatgttctgcagacttctgctctttttcaatttcttcgttaaacaacgtgacacgcgcttcagtttgtttttttgcacgatatgtatgattttccggcttggctcttttctgctcatgaaagccgtaaaccggtgatgggatgacggacggcctaaaaggttttttcgccgccgctttctcttcataatgatatgaattgccgggtttcggctgagaagctgaatatcggctcgccgggcggcgggtcctttgttcgcggctgtcgtccttttcccgcggccgcgtgttttgatcaggtataaccggaaagcggaatttcccttttggatattcatatacgacttttgcgtcggttatttgcggcatctcttcgtcctctgaagatgaatccgcctcaaattcgtctatgtgctttttttgtttttcattatcttcatcatcgcctaaaaacaggctgaacattttattaaaccagctcatgaatcatcactctctaactcccttaaatttttcggggacggttttaagtataccactgcttccccacccagaaaaggacaagtccttctccaagcgtccgccctccgaataaaaaagccgccaagtttgtctacccagcggcttctttttacatctattcgaaagttttgttcattttatgccgttaaaatgtaaaggcttctcctgctttacggccgtcgtcaagaacaagaatgcctttttccttcggcgcgtctgggagattcagctccttggcagaacaaatcatgccgcttgacgccactccgcgaagttccgcatctttaatgatcataccgctaggcatcacggcgccgactttggcaacgacgactttttggccggcttcaacattgggagctccgcagacgatttgcagcgtctcgctccctacattcactttgcaaacacttaatttatcggcattcggatgcttttctttttcttcaacatatccgaccacaaacttcggagaaaggtcgacggtcagctcgtctttcaaaccgttgcggaccagaatttcattcacatcctggacaaaggattcggaaagcgcaatagctccgctttcctcaatgctcaaatatgaggaggcattaaaaatgttatagcctgctgtttcctttgtgtctttatgaaaaattttcacgacgtctccgtaccgctcaaaagcgatctcttcacgtggaatatcgttcaatgagatgagcagcgtatcgcctacgccttctggattataaaatgcgttcatgagaaaaattcctttctatcatttctttttagggcggtttttagccagaataaagatcggttcaagctttccatcctcatacaggaaagaaagcgcagtgatcggcactgtgccgtttgcaaaaaagctcatcgacatttgcccgagtatatcgtatccggcattattgcggatgtcggcaataatcagcacatcctggtgcggaattgacacggcgagggtcccttccgcgtttttctcatactctgcgagaatcgattcgttcaacaccctgctggcgtcatagccgtcattcgctctgaaaaagtagaagtgattgcctgcgacttcgtcttctttgacaacggtctggagcgagcgaaggttaaaggaagctgtttcccgaatcctttcttttgtccagccctctttttcaagcattttttcgtcgatcagacggtatgtgttgccaaggtcgagcgcatagtaaattcgtgtttcagccgtgtggccgtcaaaaaccaagggaacgcctgcgctggacttctcgggaaaggaagttgagcggatgacgggatagatcaggctttcccgtccttccatttcctgcgactggcctttcatggcgttgagcgcttcctcagtataatagacgacttcgtcaatcgcatcatcttttttctgctcccatttcgcgatgatccccgggagctcgagtgtaatgccttttccagtgtttttatcttcgattctcaagctgtccttttccctgtcgaaatgaaaggaccagctgtcattttgcaaacgtttttttaatatatcggaaagtttccttgaggtcattttcatagaggaactctcctttcggctacttattcagtgaatcggtcaaaaattgctcgatttcctctttcgttttccggtctttgctgacaaagcggctgatttcgtttccttctttaaatacgaggaagcttgggattccgaaaatatcccactccgcgcacgtgtctataaatttgtcgcggtcaacataatagaatgtaaattccggatagttcgcttcaagctcgggcaaaaaaggttctacaaaacggcagtccggacaccagtcagccgaaaacatcaacaaggataaatcgtctttcacaactttttgcaattcttcattcgtctcgatcgttttcatcactcaacgcctccaatataagttcttatcatccattcggatcataccagactgccggctctatagccagccttttgctgcctgccggcttttttaaaagatggacgattcttatgtatcttacccgttttaaaaagggaaaatcttaaggatccgaacctctttcatatcataagcataatttttttgctttatcaagccattctcgtttaacattataagtaatagggtaaaaatatccgttaaggcgcctcgcgccgtgatcccatgacagtcaggaggagcatgtatggaatttatcgtttatcttgccggagaaatacatagcaattggcgcgaagaggtgaaggaaaaagcaaaatcgctcaagctgccgatcacatttgtcggaccgatggaaaatcacgagcgctccgacaacatcggtgaagaaattatgggcaagcaggctgattcaatcgcaaaggatgatgcagcctcggatttgaacaattttagaacttccgttttaatgaacaaggcggatgttgtcatcgctcttttcggggaaaaatacaagcaatggaacacggcaatggatgcatcatacgcgatcgccaaaggcaaaccgctgatcatcatccgacccgaatcactccatcatccgttaaaagaactgtcaaacaaagcgaacattactgtggaaactgtaaatcaggcaattaaatcgttgtcatacgtatttgaaagccggtagttgtttttccaaaaagaaaccctgggcgttaagcagcacagggtttctttgttcactcatttcgcaaaatcgactggacggcagaactgtcgcaagctttgacaagcttgatcagcaattcttttgcagcaaggtagtcatcaacgtggataatggaagcagatgtatggatgtatcttgaacaaatgccaatcacggccgaaggaacgccttcatttgagatgtgaacacggccggcgtcggttcctcccggagaaacaaaatattgatacgggatgtcatttgtctctgccgtatccagcacaaaatttctcatttcgctgtgcatcaccatggtccggtcgaaaatcctcaacagcactcctttgccaagctggccaaattgatttttgtcgccgctcgaatcgtttgccggacttgcatcaagcgcgaaaaacaagtcaggctgtatcatattggccgcagtttgcgcgcctcttgttccgagctcttcctggacggtcgcacctgagtaaagattgttcggaagttctgttccttgcagttctttcagcaattcaatgctgagtccgcagccgtagcggttatcccatgctttcgcaaggatcttcttttcatttgccatcggggtaaacggacagatcggtacgatttgctggcctggtttgacaccgatgcgttcggcatcttccctgtcatccgccccgatatcaatcatcatgtttttgatatccatcggacgtctcctctgctcatctgtcaaaagatgaggaggcgtgctcgcgatgacgccggggatcggtccgttatccgtgtggatttccacccgctgggccaataaaacctgactccaccagccgcccagcgtttgaaaccgaagcaggccgttatctgtaattgatgtgaccataaaccccacttcatccatatggccggccaccataatttttggactgccttcaggtccatgtttaacgccgaacacgcttccaagtctgtcctggatgatctcatcagcatatttttcaagctcttttttcatgaagcgacggacaagatgttcgtttcccggggcgccggggagctccgtaagcgtttgaaaaagcgttctcgtttcctgattcatctgtttccctcttttcttatgtatctctctacattttacataagtgtgcgatgtgtttccagaagagagcccatccttaacacggacggacatgttctgtataatgaaaaaaacaagctttggaggtgctgaaaggatgaaactgcgccactttcttattggagccggcatcggcattgccgcggccgtcgttgtcaaacaatatgtcatgcagccttacatttcttctgaaaaagcgctgcgcatcgtcaagtccgcttttaaacagagaggcccgatcgacggttcatggatatataccgttccggaagcctataccgtaaacggcgaaaccgtcatggtgtacaaaacaggcattacgcgttccgctttcggagagctcgaacagtacgaagtcatggttgatgcaaaaacaggcatgatcgtagatgtgattgatacagcagcatagcatcaaaaaagatgcggccatcagggccgcatctttttatatggcgcgaatcggccggtagaccggatgccacatcgcatcctgcaccgcctgaatcacatcgtccggctcgttttctgcaactccgtcttctatggctgctttgatgacagccgttgccacggttgcggaaaccgtgcgcaaatcctcaacttccggaagaagcgcggcgccgggccggcccgtatcaaccatacccgcgatcgcagccgcgctggcgtaaaacatgttgtccgtaatcagtcttgcttttgatacgagcgttccgagcccaaggccggggaatacaaaggcattattcgcctggccgatcgcataacgggtgccgctgtattccacaggcgcaaacgggcttcctgtggcgacgagcgcccgcccttccgtccaattgatcaaatcttcaggccttgcttcagataacggcgtcggattggacatcgggaatatagccggccgtttcacatgctttgccatttcttttacaatttcctctgtaaatgcgcccgataccgtcgaggttccaatcaaaatggtaggctgcactcttttaaccacctcgagcagatcaattgcatcccccgggccgttccggctgaagtcttttacctcgtcagcaggccttgcatacggttgttgaatgtcctgcaagtcgttcatatcatctgtcagcaaaccgttccgatcaacacaccaaaaacggcggtatgattcctcttccgacactccctcttgaacgagtgcggcgcgaatttgctcagcattgccgattccggccgtccccgctccaaatatgaccactttatgatccttcagcggcatttttgatattttaacggccgcaagcaccgctgcgagggtaacagctcctgtgccttgaatgtcatcattaaaggtgcaaattttgtctttgtattttttcaaaatctgacgcgcgttctgcgttccgaaatcttcccagtgcagcaaaacgcccggaaacgtctcggttgcgatttgaacgtattgatcaataaacgattcataacgctcgcccctgatcctcgaatgctgattcccgacataaagcggatcgttcagaagcctttcctggttcgtccccgcatcaatgactactggcaggaccctgttaggatcgatgcccgcagctgcagtataaacagcaagctttccgatcgaaatggcgatgccgccgactccccaatccccgattccgagaattccttcagcatcagtggccacgatcaaatcgatccggcttcttttagcggccagattttcaaatgccgttttcatgccttcagggtcattaaccgacaaaaacagcccccgcggctttctgtattcatggctgtattgctgtattgccgttccgacagtcggggtatagacaatcggcagcatttctgtcatatggtcgttcagaagcctgtagaacagcacttcatttcgatcatgaagcgccgttaaatagacgtttttgctcaaatcatcaggctgtgattggaactgtttatacgcccgttttgcctgttcttcaagcgtcagcaccttgggaggaagcaatcctgtcaagccgagagcatccctttcctccggagggaaggcaacccctttgttcaacaggggagtcgcaaggacttcaaatcctcttaaccgcgtctcgatcacttgttcatttaatttattgtggctcacccgtcgtcttcctttcaaaagttagttacccttagaatggataacaacaaagcaaaccattcaccaaaatagctagcggctttctctttttactgactctgcaatatcgccgttttcatcccattttaatgctctgtaaagggcatcgtggtaaaaaatgtaccaggcgtttttctcggcggccttcgcctgccatgcttgcttcgcggcaatcgatgtcatcggataatcgtcgtacgccagcacccagagaggattttgatgggcgtgcgtcggcataatgtcagccatatgaagggccgtttcaccggcatcttcgagaacgatcacggaatggccgtcgctgtggccgcctgtatgatgcatcgtgattccgggcaaaacttcaagcttctcgtcgaaggttctcacttgatgctgaaccgcttcccagttctctttccaatatgtatttttggagcggatattcgggtttctcatctcttcccattcgattgcagacgtgtaaatcgccgcatttggaaacacggaaacaaggctttctccctcatagcgcgtcaatccgcatgcatggtcaaaatggagatgagtcatcaaaacggctttgatatcttccgttgagagcccgagtgcttttaacgagtcatcaattgacgattcttcggtgactccgtaatttcgtttttgcttatccgtcagtttgccgagcccgataccggaatcgatcagcaggttcgtgccgtctttctgaactagtataggatctgttctaagttcgatttgatttttctcattggcgtaatacttttttgaccaaagcggcttgggaacaacgccgaacatggcgcctccgtccatgtgcgtgacgcctccgttcagccatgtcagcttgattcgtccgattgttaaagtttccatgatcatccctcctcttcctatcgtagcaaaaaatgcaacctgaatcagcttcatttgaaagcaaaaaaacagactgcaggaagcagtctgtttttttatgttcgccattcagcttcgactctgtagatcggctggcctttagcggcgaacttttcttcgtattcggtcatcacatttccttcaaaatcgctttgatgcaggtcaaggctgacgaatgtcaaaacgagtccgtattcggaaaaactggtgagggagtactcaaacaacccgcggttatcggttttaaaatgaatcgctcccttgcctccgagcacctgctcatactttttcaagaacgcatgattggtcagacggcgcttttcgtggcgctttttcggccacgggtcggaaaaattcaaatagacccggtcgacttccccgtctgcaaaaacgtctgaaagcatattggcattgatgttcaagagctttacattcggcgcctctgtctgctttactttatcaacagcggttacgatgacgcttttaaatagttcgattccgatatagtttacatccgggttttgcagggccattcctgaaataaattgcccttttccggttcctacttcgatgtggatcgggttgtcatttccaaaaacggaatgccatttccctttgtattgagacggctcgctgatcacaatatgagagttttcagccaggtagtcatccgcccatggcttgtgacgcattcgcatgtacttacacctctatctgttatatcgtcttacaacataccatgaaacgcaggaatcccgcaaggcctcttccaaagcaaaaaagaccgaagatcggcctccgggtctttcgcgtataaattacagctttctgaacattttaatccatatactccgagaatgaagggaagtgccaatattatgggcttaaatcagcaaaatcagattcatctattaaaagacattctctcagaccatcaagcagactgcaccggaaccgtcgctgaatgcgaacagatggagcggattatcaagtctttaatggcaaacacgaatcttgacgccggcttgaaaggcgttttggaagacatttatttgtacagccagaagggaagatcttccgcttcgatcaacaaccacattcaggagcaccaggattatctcacgcaatgggtggaagatatcgactcattttcatgaggacctggcgagacgctccattaattcatgcagctgttccagcccctggtgaaagccttcctgattgcctttcgctttttgccagagtgtcgtcattgctttttccgccaatacgtaccaggccattctcagcctgagattgtctgtaagagaagagccgtagcgttcgagccagcttccccattcccgctcttcaacgtaatgataaagaagcggccccagatcgatcgcggggtctgcaatcatcgctccatcccaatcgattaaataaagctggttctgatctgtaagaagccaattattatgattgacatcgcagtgacagacgaccttttctccggactgtacatcttcaagatggtgctccagatacaaaagggcctggtccagctgcggtatcggatattgccgggcctggataaactgcttcaattgagtgattacagagcttggctgaaaaggctgtttgccgagtctcttcagcatatccaaaagctctttggagctgtgaattttccgaagcatctcagccaccgcctggctgttcatatccttcggcttcagctctcttcccttgagccagtgctgtgccgtaatcacatccccgttttccattcgttttgtccaaacgagcttaggaacaattccttccgcggacaggacagccaaaaaaggagagctgttgcgctttaaaaaaagctgctgtccattatgttctgcataatatgcgtctcctgtagctcctcctgcgggggaaatctcccattcgctacctagtaattgtcccaaccagttcatatcgattttcaacccatcatttcattaaaagattttaaaaagcatctgccccctagagcgggcagcaaactgcttgtattgtcgtctctttatattcaaataaaaagacggctattgagagtcatttgtgctaaacaatagccgtcttttaaattttagcgctagacgccaaacttcgtcaagcaaaactaaaaaatcccttttggttcgtataaaacataggtcccgatgccgttcagccgaagccttttttccgcttgaaccttcccattgaagaacgtaaaaggatcgcagtgcagcaagtactgtttctgatcgggcagcttaagcgtctccttttttgcaaacggacaatgcaccactatgatttcgttccagggatcaattgctgcaatgttcttcagcttgtaggccgttacctctcctgtaccgtccataaaagaaagatgctccttgacttcttcctctttttgcagacgaaaagcgggatggcttcttcgcagccggatcagctggcgcacatattcgacatcctcgcaaagctccgcacgcttttcccaatcaagcttattgatgtcatctccggacctgtagctgttgctgtccccattctttgttcggcaaaattcctgaccggcgtgaagaaatggaacgccttgcgaaagcaggacgatcgacaccgcgagcctttgcctaagccgtttagtgtccgcatcttcttcaaaacataaggccattttatcccaaaatgtatgattgtcatggcattccacataattgattgactgtgccggctgcaagaatccgggtgaaccggcaataccgtgctgaagcgccgctttttttccggtgtcccctaaagcatatccgcggtcgctaagctcgaatgtactccctttgactgcgttcctgaaccgatcattaaaaaagccgaccgccggaacttttccggcattttgcaatgttgctttttgcccgctgtcaagcggggtatttaaatcccagccctctccgaacagaagcacgcccggctttatattctcggcaagcgtactgatttggcggatggtttcaatatcaagaatgcccattaaatcaaaacggatgccgtcgacatcatattcttccagccaatagcggacagaatcgagaatatattttcgcaccatcagccgctcagaagcaatgtcatttccgacgcctgttccgtcggatggaaaaccgtatacattatgtctgaaaaaatacccgggaaccgttttttcaaaaggggacgtttccctcttgtacacatgattatatacggcgtccataatcacggagaagccgtgtttgtgcagcgactgaatcatcgttttcagctcggtgattctgcatttggggttctgcggatcgagcgaatagcttccttccggggcattaaaatggagggggttatagccccaattataagattgatcaggagacagctcatccactccggcaaaatcgtgaaagggcagaacctcgatgtgggtgacgccgagctctttcaaataggcgattcccgttgagaagccgccggatgtttcagttccgtcctctgtaaaagcaacatatttgcctttatggcgcataccgctgtcttcatgaatcgagaaatcgcggatgtgaacctcatatataaccgcatcgcacggactgtgaagtcttggagcgcggtgtttttccaccttgacttcctctggatctaatacaacgcctttttccccgtttgccgtaacggcttttgcataaggatcgactgtcaataacggcttcccatttacataaagctcatataaataggaccagccgtttagatcgccttcaaccgttacctcaaaaacgcccttttttctgcgcatcatttgaaaagtatttgtttgaagcgaatcagggttctccagcttgatcgttgccgcactcgcggtcggcgcccataccctaaataaagtacttccttttgaataaaaagcgccgaggcggccgtcataaaaaaaagccttgtcaaacgccgcgcttctcgtaacagagccgatttgcaggtctgtccagacgctttcttcacagcatactttgtgaactcttccgaatggaacattgcagctgctttcaagaacatacttgaattgttcctcaagctccacctgcgcttttaccgaaagctctatcctctctccttgatcatcttcaagcagaaaaggagggctgcagcttgacgcacggctcttcggaactaaaacagtgatcgttctcatttcatcgagataagcttcaaaagggcggctgatacccggcatttcagtctctccttcattcgaaagatttatgctcttaatcgaagggattcagtccctgttttaatgaaaacgggcgcccagccgatcacctctccatccgcttgaaagagcacccgctcattcgtatgaaaatagatgtctttcgtcttaaatgccgtaacaccgtttttgccgacgtgtttgccgaatatcatcgcaaacaagaggccggcttttttcaagacgggcaggtcttcaataatgatcacgtctaaaagctcatcccgcggattcgcattcggtgcaatcttcattcctccgccatagtaaggatggtttgaaaccgacgcaaaccagatttttttaaacgtacgcttgtcatccccgttttcatacgaaagaacaaacggtttagacgtaaacgccgtgacaaagaaaatcagcggatgaatcaaatgattcagcctgagagcagccgtccatttcggcaaagctgacatcttcttggcggtgcatgcatcaaatccgaggctgagatgattcgcaaaataaagttcattatcactgtctttcgtatgaaagcttccaagggcataggtccgggtcagcgattgcccttttcgcttcatttctttgatgacattcgattttttcacgccaaagccgcgtttaaaatcattgcttatgcctgacgggatgacgctcagctgaatgtcccgcaagctgactaaaccattgagcacttcatggacggttccatccccgccgatcaccagaagacgcttcagcctgtcatcctgcatcgttgatatttgccttgccaacacctcagcatgcccgggatgctgagtcataaacgagcggtacgatatatttgccttttggaggtctttctgcaatgatttccatgctctgaaggccgtcgagtttcccgcctttggatttatgatgatataccaatcgctcatgattccattctccattttatagtatgaaaaagccgggataacgttctgtcggtcagctcagccattcctgcctccgcaccgagtcggagacgccgtgcgacaaaagaattttcgccgttttcagctgctggcttttaatcggggcgaagtttttttgctgtttctccagccactctttccagtgtctcttgtcgcaaatgccgattccgtatggtggttccggataatcgatgtacgatgtacggctgacgatgactttgcgcacaggcagttcaactcccgatccctttaacaaaccggaaagaaccttgcctgtcctgaggagctcgacagccggatttaacaatgaccgttccttgccccttaccgttttttctttccaaaaacgatctttggaaccgataaatgcgctgtccctctcaccttcaagaaatgacatacagtagatttcaaggggagtgagaatcaagacgctgagctctaccgcagcctgattcacctgcagcaccggccgatacatgatgaaatatgaatccgggagctgctgtgccaaaatgtgcaggattttatcgctttttatttcccgggaaagcctggatatgtcagagattgtcgagcttgcccatttcagctgaaactcgtacacgtattccttaaaaaacgatatgagttcttcccctgccgcaggaattcttgcgatcaagctttcatccgtttctccgtccagtccgttaaaccattcatcggcttcttttcctttattaatatcggatgcttctttttttctctttaatgtaaatgtattctttctttttccgaacgtttcatcaccggcggctcctttatcgtgatgaaagctttctttctttttttcagacatctctttaattgactgccagcgctgctttttcaagcggataaactggttgatataatgataaggatcctgttcataccttgaaatacagtcctgtattttaataatctgtgccatctgcgttcatctccgaatcttgcttttctgcagccggccgttcgccgaaatggaaaacggcttgatgctcatatttgggaagcctgtctaaatgggtttgaaagatggtgaaatgcagggccgtaaaagacaccgcgtcttcaagcggctccaggcgtccgttaaaagaggccgatccattccactttctggcgaccgtcacatgtggatgaaaaggccgtttttcaatttcaaagcccgcctcatccgctgcatgcttcacctgttccctcacatggaagagagcggctgagtattccggttccacatgaagaattctcggctccgacggctttccgaaggttccgaaacgttttatcgcaagctgaaacggagccgtctcatcagagatcagcttgaggctgccagcaagcatcgccagctgctccttttcagcagagccgaggaacacgagggtgatgtggtagtccaaaggatgcacccatctatgaaaagaaaattccggacggctgctgaccgtttgataaagcggctcactaagctccgccggaattggaattccaataaagtaatgcggtttgactgacatatgtatggcttcctcctcattcgtcttctctatattttaacaaaaaatatggacttataacctctctattttccactttccaaggccttatgataggatattgacagaatcatgtttttcagaaagggtgcacagttgtgagagccgttcaaaatattgcagaattaatcggggaaacgccccttgtcaagttgaaccgcgttcagcccgaaaacgcggcccaaatttatatcaagcttgaatcttttaatccgagcggaagcgtaaaagaccgcgcggcctatcaaatgatcctggatgccgaagaaaaaggcctgctgaaaccgggttcaaccatcatcgaaccgacgagcgggaacaccggcatcggccttgcgatgaacgcggcggcaagaggctacaaagccattcttgtcatgcctgatacgatgacaaaggagcgtatcaatcttctgaaagcgtacggagccgaagtcgtcctgacgccgggggatgaaagaatgccgggcagcatcaaaaaagcgcaggagctcgctcggcaaataccaggcagctttattccgatgcagtttgataatgaagccaatccggaggctcaccggagatcaaccgctctggaaattgcccgggcaatagaagaaatcggcaaaccgctcgctgcatttgttgcaacagcagggacagggggaacgattaccggaacaggcgaaaagctgaaagctttatttccgggaataaccgttcacgtggcagaacctgcagggtcgcctgttttatccggcggcaaacccggaaaacacaagcttgtcgggacaagcccgggatttatcccaaacattttaaacgaaaacgtctatgacgaaatcttaaagatcaaggatgaagaagcctatgagatgacgcgcagattggcgcgggaagaaggaatccttgtcggcccttcttcaggagccgcttgcttcgctgctgttgaaacggccaagaagctcccttccgacaaagtggtcgtctgcatgacggccgatacaggggaacgctatttatcaagcgatttatttcaatttgattaagagagaaaagcctggatttctgttttgaaatcaggctcagattgttgaaaaaatcccaaagctaagagacgttttgggattttttcatcctttcagcgtgaacgcaacccttgcagtctaggaaggccgagcattggagctggttttcacaggatgtgatgacggcagtgttcaggcaggacgacgcccgctccgttagccgccgtttctcttttgttcgtgagcatcgacttagcaggcctggcaacgaatgctatggtttgccgacacggaaagaagcggataaaacgccccgcaaccgaaaaagaacaaaaataaaatgaataaaaccgtttcaattccttttcctgcttcaaaaagcccctctcctcccggacgcctgtacgcaccttcactatattcgttatccctgaaaacagcaatgtttaacagcaaaaaagccgctctctagagcggccgtctatgttgtgctacacatgcattcctgttctggcatcgttgtgatccgttatatattcaatccgcttgaaaccgcagtcctttgcattttgatatagaagctccagttttttttgatctttgcagtatatcgtgacaaaactcgaatcggctgtaagcacaatcagctcgcagctgcttttcatatatgattcatatgtgctgacatcttcgggatggccatccttcggaaaagccttcagatcggcgaagatgagatagcaccttgcgtcttccagcctttttttaaatgcttctcctgtcatcacctgcggatcttgaggaaaaagattttcatctgacaattcaccgttccacgagatagcattcgccatcggcaagcagccaattgaaatcggccggttcaaccggcttcagtatatcgagaagaaagcgcccgtacccgttcgggatttcaaataaaacgcctcgcttatgactcatgccatcactctctttgctacttcgccaattcataaatggcctgtgcataaatcgatacagccttcagcaaatcgtcgatttccatatactcgtctttctgatgggcaacgtcaggacggcctggaaacagcgggccgaatgccacgccggctttcagtgatcgtgcatatgtcgccccgccgatggaaattaattgtgccgtttcccctgtctgctcttcatagacccgctgcagcgttttgatcagttcatggtcttttgctacatgatgtggcttgctgtctttaaagctgatgagccgggcgccctttatttgtgaaagcccggatttcacccggccgctctcttcagtaacaggatagcggatgttaatatgggcctccccgccttttccttgttcatactgcagccggccgacattcagcgtcagctctccgctgatgtcatcgcggcagccgatgccgatctttttccctctcgtatctccggcaaaagccccgctaaccgtttgaacaaaatggagcccggctctgtcaagggattgtgtatgtaaaaactcggccaaaatgagaccggcattgactccgttattaggttccatggcatgagccgatttgccgtgcacggttaatgtcagtctgccgccttcttgaagaatacgcccttctgcgcgtttttcttttacaaaccgtgcaaatgactcttcaaattctgacgggacggcccctgccaggacggcttccgcatcatcaggcaccatgttcaggcgccggccggaccggaatgcctccaatactaagtccgcacctgtttccgcctgataagtttcaatttttaaagctgcgtcaatcaggcctttttctgcatagataatcggaaaatcagcatcaggcgcaaaaccggccgaaggcatttcttcgtgtttaaagtaatgctccacacagcgccagtcgctttcttcatcggttccaataatcattctgatccgttttgataaagggaggcccgagtctttgacaatttttaatgcatgaaacgcggccattgtcggccctttatcatcaagcgctcctcttgcatagattcggccgccccttatttcagctgcaaacgggtcgctcgtccatccatcgccgggaggaacgacatcaatgtggcaaagcacgccgataatctcctcgcctttcccccattcgatatggcctgcataaccgtcaaggttttttaccgtaaacccgctttcctcccctttattcagaagcgctgtcaggcattcttgaatcccttttccaaacggccgtcccggacccgccgtctcttcgtcaaggacgctgttgatttttaaaaaaccctgaatatcctcaacgatctcattccgtctttttaaaacttcctgttcccagttcataatttcgccccttcttttttcagtttagccaaaaacccttgcaaaaacacccgataacgaataatatagatattgttttgctataatgttcgttattggaggaaatgatgtttaacataaaagaaaaccaaaccacagtcaaaaaagaaatcctcgccggtattacaaccttctttacaatggtttatatcgtcgtggtcaacccgagtatcctttccggcacaggcgtcccgtttgatcaagtgttcactgccacaatcatcgctgcagtcgtcggaacgctttggatggcgcttgccgccaactttccgatcgcgattgcacccgggatgggactgaacgtgtattttgcagtgtcagtcgtcggctcatccaacggcgaaatttcttatcagacggcgttcagcacagtcttcgcggccggcattctctttattatcttatcgctaacacctcttagaaaacaactgatcgaagcgattccggctaatttaaaatacggaattaccgccggaatcggattgtttatcgcttttgtcggtctgagaggagccggcatcattaccgcgaacgaagccaatttggtcggactcggcaatctgcactcgcccggagtgatactggcattaatcggcttggctttctctgtcgttttgatggtgatgaatgtgagcggcgctctatttttcggtatgatcttaaccgggctgatcgccttttttaccggccagcttgagtttaccaaagggattatgtcgatgcctcatctgccggaaaaactgatcgtcacaaaccctttcgccgcttttggcgatgtcatccactacggcctttattcggttgtcttttcgtttctgctcgtgacgatttttgatacgacaggaacgatgatcggtgtcgctgagcaagccggactcatgaaaaacaacaaactgccgaatgcaagaaaagccctccttgccgattctacagcgacgacagtcggtgcaatgttcgggacaagtccgacgaccgcctatatcgaatcatccgccggggtggccgcaggcggaagaacggggcttacgtctttaacagtcgctgtgcttttcggcgcggccctgtttttcagcccgcttgtcagtgcggtctccggaatcgcagcgattacgtcgccggcattgatcattgtaggaagcatgatgatcggcgccgtgacgaacatccgctggaaagaacttgacgaagcatttccggcctttctcgtcatcttgacaatgccgctgacatcatctattgcgacaggcatttccctcgggtttatcgcttatccgattgtgaaagccgcgaaaggcaaatggcgcgagattcatccgcttgtcttcgtgtttgctgttctctttttcatacaccttttctttttggaagggcattaatcaactgaaccccgtcttatttaaaaagacggggttttttcaatatgtacttttaacttcatcatcttcaccacctttcttttattacgtatgaagaaagaaaaagtttaaattttttcatcaaaaaaacgtgttcgcactgcatgttctgctcgcgattttcgttttttcaataatttggctccgccttttttctggatatttggcaaagggatcgtgtataatatttattgatcattttcaagaaatggtcgctaaccgtccatgctgcattttggagtcgtaagttgtggtagtcaagtccattcgatcatacgatagggagtggttgtttgaaaccttcaacaaaccgaatgctaaccaggatcaaatcagtctacatgttcattcaagaaaagggactcgttacaacccaggaactggttgatgaatttggcactacaccgagaacaatccagcgtgatctgaatgtgttggcatacaacgatctagtacacagccccagcagaggcaaatgggagactacaagaaaaaaagtgaaaatctcctcatagcagtattctgaaaaattgaactttagcgctgaatatcatataagaaagccatcaaacataaaaagcatcaaacttggttaagttcgatgctccacaaacccatttcaggcactcgatgaatcagagtgtctttttgttttgcaatgcggcaagctcgtgttcagagagctccctgtattcccctggcaatagctcttcatcgagatcgacatcccccattttcagccgctttaaatagatgacgtcatggccgaccgccttcagcattcttttcacctgatgaaattttccttccgttattgtcaaaagcaggcgttctacgccgttttcgcttgccagaagcgatgcttcagcaggtttcgtgacatatccttcaccgatatcgacccctttttcaagctgatcaagtgccgcttgatcaatcggcttattgacatggacttcatacgttttaggtacgtgttttttcggagataaaagctggtgtgccaactgtccgtcattcgtcagaagcagcagtccctcagtatccttgtcaagccttccgacaggaaacggctcaaacctcagcagctccgggtcgagcaaatcgacaaccgtttcctgccggctgtcttctgttgctgacagcactccttgcggcttgttcatcattaagtaaataaattcccggtacatgacgggtgccccgtataccgtgatgtcgtctgattccgggtcaacgtgctttttggcgtctttgactaattgatcattgacgcgcaccgcgccgtttttcagcatttttttgacttcttttctcgaaccatagccgctgtttgacaacagtttatccaatctcatgaagacacccctttttttacataaaaagaaaagccctttttaggaggcctttcttttgaaaaagcgattcaatcgctgaccgaagattttttcgagcagtttcacacggtaagccaagtacagataaactgacccgcccactgcggttgtgatgaaaatgacgacagcagacctgatctgcccgccttcgtatgaaataaaaatacttagaagcgcctggacaagcagcaaaatgatgcccatgaccgccgtcaggatcagcatcagcaaaaaccgtttaaacagtttgcgatacgaatagccggcatggcgtttaatcatgataaatccgtataggagtgaagctgaatagccgagcgccgttgccaaaatcgacccgctgccttgaagcagcttgatgagcggaacgttaagcgcgattttgatcacaatcccgatcatcaagctgacaaccgcaaatttctgcttgttcaccccctgcaaaattgcagcgttgacggtgaagagcgagaataacagcgccacaggcgcgtaccagaacaaaatatctcgtcccatttcagggagcaggctttccgagccgtaaaagaacgtgtaaaccggccccgacaaaagagccataccgactgatgccggaagaacgatgaagagaatgatctgcatcgcctgatcaatctgtttgtttaaagcagggaaatctttgttggtaaagttttcagtcaccgccggaatcaatgtcagcccgaatgccgtcgcgagagataccggaatcatcacaagctttggcacgtacagcgtcacgatcgccatcaaatcctggctgatgttttgatagccggctgcaatcatcgctttattaaacgtattcgtatcaatgtactggtaaagcggtatcgccagcccgacaaagacataaggggcggcatagctgaacagctctttaaacatttgccggtacgtaatatcggctgaaggaacaaggttcggcttcagcgccaggagcgccccttttcttttctgccaggaaaagtaaagagtgaacagtccggcgaacgctccgatcaaagccgcaaaagtcgcatagccgacagcgacgacaagcccgccgtttaatactttgatcaccaagtaagtggccgttaatagaaagacgattctggcaatttgttcaactacctgtgaaacggctgtcggccccatcatctggtgaccttggaaaaagcctctgatcagcgccaagatcggcacaaccagtagcgcgagactgaccatgcgaatgacatacacgacatgttcaagcgtcagcccgttgttttctgttccgccaagggccatctctgcaaaaaacggggcggacaaatatagaatggagaaagcaatgatgcctgtgacgagcatcatcgacattccggcgcgcagcatccttctcgttgtttcataatcacccatcgagttatatttcgaaacaaacttggacacggccgccggaaaccccatggtcgcaatgcttaaaaaaatcgtatattgattataaccgtactggaacagggcaccgccggtggcaccgaccatggctccgaacggaatcaaataaatcattccgaggatccttgaaatataggtaccaagcgttaatacaaatgtgcctcttaacagtttgcttgacatgttcccaatcaccatttttcttcaatagattcaacttttctattttaacatacaggcgctccactcaggtaataataacatggctaaattttaacatggctttgttttatcgttttttcatcatgccgttctttcgttataataagaagatggagcgcggttgttgtctgatgcaatctgccccgcctgcacagaatgcaggctttacaagacaggaaagttgaggatattggtatgaagtattttgatgtcatcgtcatcggcggaggcccctcaggattgatggccgcaatcgcggccggtgaacagggggcggacgttctcttaatcgacaaaggaaacaaactcggacgcaagctggccatttctggaggcggacggtgcaatgtgacgaaccgcttgccggttgatgagatcatccggcatattcccggaaacggacgctttttgtacagcgctttttctgaatttaacaatgaggacatcatcaagttttttgagcgtctgggcgtcaagctgaaagaggaagatcacggaagaatgtttcctgtctccgacaaggcgcaaagcgtagtggatgcacttttaacaaggctcgaacagcttcatgtaagcgtacgtacaaacgaaaaagtgaaaactgtcctatacaatgaagaaaaagcgttcgggatcgtgacgggcagcggtgaagaaattgcagcgggatctgtcgttattgctgtcggcgggaaaagcgtcccccatacgggatcgaccggagacggctatgaatgggcggaaaaagccggccatacgattacggaactgtttcctacagaggttccggttacgtctgacgagccatttatcaatcagaaaacattgcagggcctatcactgagaaacgtcgccctcagcgtattgaacaaaaaaggaaagccggtcatcacccaccaaatggatatgatttttacccattttggactgtccggacccgcagtcctcagatgcagccaatttgtcgtcaaagagttgaaaaagcaggaaaaagtcaggctgaaaatcgacttgttccctgatattcatgaggaacagctttttcaacgcatgcataaagaattgaaggacgctccgaagaaatcactcaaaaacgtgctgaagccttggatgcaggaaaggtatctgctgtttcttttcgagcgcaacaagattgatccttctgaaaccttctcttccctttccaaagaccgtttcagagctttcgtcaaagactgtaaagagtttactgtcaacgtgaacggcaccctttcgcttgacaaagcctttgtgaccggcggaggggtttccgtaaaagaaatcgatcctaaaaaaatggcgtccaaaaaaaaggaagggctttatttctgcggggaaatcctcgatattcacggctatacgggtgggtataatatcacatccgcgcttgtcacaggcagacttgcaggcttgaatgcaggcgaattttcgctttgccggagaaaaaaataaaattgctccaaacccttgacaaatgtggaatggcagagtttcagcccagtgctgagacttgtgccttttttgaaaagtatgttacggttaaagagttttgtttcacctgattgtggggtaataggggaagctaggtcaaacttcctgagagagaatgatttttatatgtgcaactcatactaaacataatgatgggagtaaggacgaaaaatgattagagggtgaggatgattttgaaaaatatttcaagcgttttttggattgtgattgttatcacagcagcagctgtattatggggaatcgttgctccggataaccttcaggcgttaacgacttcgattcaaggttatgttacaaacacactcggatggtattacttattggtggtttctctgtttgtcgcattcagcatctttttgatcttcagtccgattggaaagatcagattagggaaacctgaagaaaaacctgaattctctcgattatcttggtttgccatgctttttagcgcaggtatgggcattggtctcgtattttatggcgcggctgaaccgatcagccattatgccattagctctccatcaggtgaaacagaaacagcccaggccttcagagattctctgaggtatacatttttccactggggattgcatgcttgggcgatctatgcgatcgttgccctttgcatcgcatactttcaattcagaaaagacgcgcctggcttgatcagcgcgacgctgtttccggtcttcggcgacagagtcaacggaccgcttggaaaagggattgactgcatcgctgtatttgcaaccgtcgtcggtgtagcgactagtctcggaatcggcgccacgcagatcaacggcggactccattatctattcggagtgccgaacagcttccaggtgcagctggcgatcattgcagtcatcaccgttctgtttttaatttccgcttggagcggaatcggaaaaggcatcaagtatttgagcaatacgaacatggtgctggccggcgtcctgatgatctttatgctgtttgtcggaccgacggtgttaattatgaactcgtttacggacacgatcggaacgtatatctccaatgtggtgcaaatgagcttccgccttgcgcctaatgatccggacagccgtgaatggatcaattcatggacgattttctactgggcttggtggatctcctggtcgccgtttgtcggtattttcatcgcccgcgtatcaagggggcgcacaatcagggaatttttgattgccgtcttgtttgcgcctactgtgctggcgtttctatggttttcaattttcggggtttcagcgatggatcttcagcaaaaagggattttcaacgttgcaaaactgtctacagacacgatgctgtttggaatgtttgaccactacccgctggctatgattacatctatcgttgccttgttgctcattgccgtattctttatcacttctgcagactcggcaacatttgttctcggaatgcaaacgacttacggttcactgaatcctgagaattcggtcaagatatcatggggcatcatccagtcagcaatggctggggcgctcctgtattcaggcggactatcggcgctgcaaaacaccgccatcctggccgcactgccgttctcagtcgtcgtgattctcatgattgtatcgttatataaatctctgtcacaagaacgaaaagagattaaacaagccgagaaattccagaagccaagaagcccgagggtgaaaaaagcataaatgaaaacagctcttctctctgaagagctgtttttttatgtcctgtataagattaacgctgaaaaacagtaaagctgttcgccttgaggatcgcatgcggctgatacgtcatattttatatcgaccagctggtcttccgacagcttttttaagaattcattgatttcatgctgcaaatctttttcgtgttcttcatcaaatacggccaccttcagcatacgctctctcctttctataatgaaaggtattcgcacacagccgaagttatgcttaaaatccttagcaaaagagccttcaacattggcagcagacgctccgaacgttacctggcatttggtgctccattttaaataaaaaaacttcttacctgtacagataagaagtcaaatccgcttattttgttttcggcttcgtgtttccggtccattcgagcatgccgccgaccatgttggtgacatcaaagcctttatcctgcaaatagaggcagacattttcgcttcgtttgcctgatcggcacacaaaaatataaggctgatccttttgaaagacgtcgagtttttcagggatatcccccattttaatgtggacggcttcagggatcattccttcagccacctcttcatcttctctgacgtcgataatgttcagcgtttctccttttgcaagcctgtctttcagttcatcaggcgaaatctcttttatcgtcatcattactgctcccttcaattgcctttaggtgagactattatagcaaaagtcgggaggccatttctatttcggcatgttttctctatcgtccgctgtcaggaaacaccgactttcccaatggctgaaacgatccgtcctgtgctgcagaatcagctgtgaagcttccccccatcaggcaaacaagcatgacggcgaaaaaacaaatgttttttttcatataatcccctccttcattttatatatttgatttttcgcatgctgcgatttttccaggtaaagcgcgcttttttcatggtcgcctgacttcatgtaatagtcggcaatatcttttgtcagttcagcaacatgcggccatagccgtttatcactcatatattcaagcgaaaattcaatatcgagcggatggccagcgtcatacagggcgaaaatcagcctgaacttcgctgcgtattcatcctctcctaattcggccgatctggtaaatccctctttgcagagacgtctcgcttcttcgggagaaccgtttttgtacatgaggtgagacagctcgaaaagggtgttaatgccaaaaaccgattgctcatggacaccgattgaaagggcttttctaaagtgctcctccgccaaaagcggcatgccgcatttggcatagttcagtcccatattatgatagatcagcccgatgattcgccggttttgaagggcaacggcctgatcaagcgcccgcccgtagtgctcctcagcttgtttgatgcggaacaattcaaactgcaccgatccgagtatcatttcgcatccgatcgttttgtctatgtattctttatgcttgctgaaaagtgagagcgctttttcggagtagttcaacgatctgaaatgatcgtctatttggtagtaggcggtcgcgattttataataaaattccgctttttcaatttcatcggtcagtttatgcagcttcgcttccgctttcttgtaacagctgatcgcctcaagatagtttttctcataaaactcatacatgcctgaaaaaaagaaaaaatagtactgaatgatgtcatccgcgctcttaaccgtttccttctgccttttaattttccggaaaagctcggctgattctgcaaactgctccatcatcaatttgcagcgatagtccaacagctgaaaataaagctccagatctccgcttttctccattttagaaagcaggttttggatctcgtacctcaaagatacagcctggagcgcttcatggcgcttgatcatgggtaccactgattcaggagcccggccgctttttcgtatgccgctttcgcttccacttcttcattcatcctttctcctttttaaaagcataaatattacctttattttacataatatgattgttattggcaattatttttatgaataagtgcagggaatggcatcagctccaatatttgagctgactttcgaggtttttggctgaaacaaggcctttttggaattggttcggacaggtgaggttgtattttttaattttttggttgatggcatcaatcagcgtttcgcgctgattcgatttgatcgctttttcaatctcttgtttaatttccttttgcagcttcagccattccggcagatatcgggcgtttttaagggttgacgaaagcgcatccccctcgagcatctctttgctgagcggttttccataaccggggagggacttgaaatcgtctttcttttcgctctccttcacggcttcatcaatccagtgaagatatcgtttttcaaattcttcacccatatgggccagctcctttcacacacctaaaacaaaggattaagtgtgtcttgtcgttatgacggtttccttctgttctgcggcttccgcttttttcaacacttgatatgccagccacataaccgcataactaagcagactggcactgaaaaaaggaacgatcccgggcagaaacgcaaaagcgatataaagcattgcagtgaccgccatcatcgttaatgtatactgcaaatacgatatgcccagaatcagcgaaaacttgaaatacattcgcttcttccaatcgaaatgggcgagcagcgggaacatataaaacagcatgatcaaaaacaaaaatccaaaaaccataatgacgaaccggagaacgtgcaataggagatgatccggataaataaaagcaagatctacataaatgatgatgccggccgccgccagaatgagaccgatggcgttggaacgaaaaaactcgccgcggtacgcctgccagaacgttttgaatatcggaatatcggttttgcccatgatccattttctcgtcactgaaaacaatgcagtcgtcgccggcataaacccgaagacgccaaggccgagcatagtaaaaacaaaccacagcagattggcgtaaaaaaacttcagcacccattcacaaaagctcagcacccttcccatggagacgttttgttccatgaatttctctccccctttatgtatattgccgggtatgcagaagttcactgattcctatcggctttttttctttgatggagcgccacaatgcctcgccggctgcaattgaataggcgcctgcttcggcaccggccagaatgtcgtaattcctcaaagggtctcctccgccaaacagctcctccaaaagcagcgggtctcctccgccatgcccgccgggctgcctgacgacgcgaatcgtttctttcgattcaaacagcggataataatcgatggtctgttcgggaacttcaaatgggactcttgccggagcatgatattcctgtgtttcaagccttccctttgtcccgttgattgcaagccggtagccttcatacggggctgaaaaatgaacggagtaattcagcagcgcccctttgccgtatttcaaaacggctgcatacgtatcctcgatgtcgatttcttcatcgaaaatacacgcgtcaggcctgtaatcggtatagagcagatgctggctttcattggtcttgacatggtcgtcctgcgggtcgcctgcctgccacctcatataatagcggcatttcttcttgacatggcatgttccgcaatagcggttttcccctttttcaggattcatttcgccgcggggtccgtagtagtacagaccgccgtaggcaaaaacctcgctgggcgtttgatcaagccaccaattgacaagatcgaaatgatgggttgacttatggacggaaagaccgcctgagaatgctctcatcctgttccagcgtttaaaatagcttgcgccgtgatacgtatcgatgtaccagttcaaatcaaccgacgtaatcgtgccaagctttccgtcaagtatcagctctttgatcttgcggtggtacggattgtagcgatagttaaacgtaacggtcacttttcctttgctctcggcttcggcttttaacacggctgccgcatcccgtgccgttgtcaccatcggcttttcagtgatcacgtcaatatctgcccgtaaagcgcccaatatatagcggacatgcgtatcatcacggcctgctacaataatggcgtccggcttgattttgtcaagcatttcggtaaacgctttctcttcgaaaaacgggacggggcgaagcgccggaaacctttctttgcagacttcctccctcagcggatcgatgtccaagagcgcagcgatgcggttttctttcccgtattttcccaccagaggctcgataaacatgttaaaagcgcggccgctcagaccgcatatcgcatattttttcatcggctcctccccctttcattcattttgcttgaagcgcttcgatgagttccgtcgcttcaggggttttcttcgcataaaccggtatgaaagctgccatatctgtattcaactgaaccgtatagccgttcaaacgtttttctcctttttcgatgacagccgcatacagctgtacttccccgtttttgcccggagcgctgtacggctctttttcttccgaagcagcattcaatggctgaagtccttcaggatcgtaaaaaggtttaaacatgtcttctggaacgataaacagatctccttctttcgccgcaatttcaacaaggagtttttccggggttgccgggaaaacggtgatgttgagctgttctttcccgacagcgcgctgcacgttttcctttacttcagccggtgcatccgaaaaaatcaatacgtctgttccccggctaccatcctttccgcatgaggtaagaagaagcactgctgctattagaaggacggagaaagcgaagtttttcacttcgcttccccgcaggaaaaacggccggtcttttcaagttctacaagagccataaccaaggcgccgacaccgtgaagatcgttggtgcttttttcccgtccgacataataatcgtatgtccctgcagaagttccgacgcagatatcttttaaaagcaagccttcttttgcgctcatctcgattttttcttcgacgagtcctttgaaagcctttgtcgctctatcaatatatgatgaatcaatatagcccatgcgagcccctttggccatcgcgtacatatacaaacacgagcaggagctttcgagccaattgtccggaagtccgcctttatcgacaacctggtgccatagccctgtgctttcatcttgaaaatcagcaatgcttttgaccatctcttgaagcgtccgggtccactcctgtcttgtgctatgcccctgcgggagcagttcgatcatgtcgctcagtgcaagcgcgtaccagccgattgaccttccccaaaattctggagaacagcctgagacggggtcggcccaaggcatctgcctcttttcatcccacgcgtgataatataatcccgtcctgcagtctttcgtatgctttctcattagtttttcctcgaggatgaccttatcgtaaagttcaggctcattgaacgcccttgcatacttgagtgcgaaaggccctcccatgtacaacccgtcaagccacatttggtaagggtatttatctttatgccaaaaaccgccttcttctgtttgattcagcgtttcaaaaaggcccctcagcttttttgcagctttgcggtagcgttcatcgcccgtctcctcgtacaaaggataaaggagaagtccggcttgtatagcgtccagctcatccctcctgaaataaaaattgccgcagtcatcgatgagatcatcggcatattcttttacatatttgaagtatgcttctttccccgtttcttcccaaaggcgaatcaggccgcacagaaatacgccctgatggtagtgccagcgcccggccggtggcagctctttcggtgtatacgctttcattattgttttggccgcttcttcagcaatgtaaagaggcgattttgtgatgagagattgattcatgtcattcaattcctttcatcaaaaaatattaatatatcccttcttctccaaatttcttcgccatcctgtttgcaaatacgacaagaatgagaccgacagctgctttaaataaaccgacggctgtactgtagctgaactgtccctgctttaacccggccgtgtatacatacgtatcaaagatttcggccacttcgcggttcgttgcattcaaaagcagatacacatgctcaaagccgagttcgagcgtatcgccgattttcaagatcagcaaaacgacgatgacgcttctgatcgcgggaagtgtgacatgccacatcctcctcaggcgattggccccgtccattttcgccgcttcgtaaagctgcggatcgacagctgtaatcgccgccaaatagatgatcgtcgaccagccggcttccctccagatgacctgaagaatgtacatcggcctgaaccagctttcattcagcaaaaaattgatcttttctccgccgaagtaggcgataatctcattgatcaatcctccgtcaacagtcaacaggacgaaagaaagcgataccacaatgacccatgacataaaatgcggaatatagatcagcgtctggacaaactttttgaacaatgcgactctgacttcattcaataaaagcgccaaaataatcggtatcggaaagaatacaacaaggttgagaaaaaacaaaatcaatgtattcttcaacagcataaaaaacgtcggttcggtaaacagcctttcaaaatgcttaaagcccacccattcgctccccgttatgccgagaaacggctggtaatcctgaaacgctatgacaatcccccacatcggcacatacttaaaaagcaaaaaataaatcagtcccggcaaaatcatcaaatataaatatttttgctggagaagcttttcccaaaaacgcgtctttcgtttttttccaacaacaagggccggattttttccggtctggacatcggctgctttcataaacggcctcccttcgtgatgtttgctttcactttatcccaccatgaaaaaataaatctacaatcatatcatcacatcggccgcacctcgcccggcagccggcaaaacctaataaaatgaaacgatggttagaaaatgattattgacaaattcacacaaaagtcggattaattatatatgaacaactcaaacgaagatttgttgggggggaatttatgaagagaaaacaatataagttttactataaactggtgaccttctttctcattctgagcaccattccggtcatcatcgtcggctttttttcctatcagagatcagcggaaacgattgaacaaaacgttacaaacgaaaagctccaaaccgttagccagacacagctaaatattgaacatattttaaaaacggttgaccattccttcaccaattacgtccgttcctatcctttaattcagacgctcagccgcaccattacaccagaacgctttcagctgtataaccaaatcaacaaggaattaaacgaactccagacattcgataccgatctgtcggatatcacgctgatcagccaagaaaaaaagtggtatatcaacaactccggtttataccctttagatcagggaaaacaagccatcacgctctcgctttacaacgctttaaaaagccgttccagctgggtgcttgaaaaaaacaacggccttgtcgccacaaaagaaggggcttcgggaaactgcctgtacaacgtcaatctggtcaaacagcttcccctgaacagcatggaaaacagaggccttgcgatcgcgagcattccttcttgttcgcttgtcaagcgcatgccggatcattcaaaaacaaacagcatgatggtgcttgatgacaacggacggatcatccttcactcagacccgtcaatgatcgggcaatcgatcaaacaagaaaattacttcaaaacgatccgccggcaccaagaaaaaaacggccagtttgatacaacagtcagcgacaccgcctataacattacataccagaaatcagattataataattggatatacgtttcgttaacgaccattccggaactctatcagcagacggcatcaatcggctggttcacgtttacgatctgcctcattttgttagcgctttcatatttattctcctggtttggttcacgccatttttacaggccgatcaaggttttatacgaatccgtctccggctttcctccaggagccgattccgtccaagagaaaccgaaaaacgaatttgaactgattgaacggaacattaaagaaatgaaaaataaaaaccatgatctgaaggtgcgcgtcgaacagcaggtcacccagctgaagcagtattttttaacaaggctattgctcggcaagctgagcgaagaagaaatcaaagaccgctttactgggctcggcttccctgaagattggagccatctgtcggtattcacactgcaaattgatacattgaaagacacatcatacgaaaaaaaggatcttgatgtcctgctgtttgcgatcaacagccttgtcgaacgatctgtgcccaagaataagcgccttccgccggttgtcattgataaaacgcagaccatcatcatgctgaatcgcggacagccgctggaaaggtttcaggaagacttagagcataccgcatcagccattaaggataaaattcatgaagagcttgggttgttcgtcagcatcggcatcagccagccatttacaagtcttgcaatgtcaaagcgcggttatttggaagggcttgaagcactgacataccgtctgaaatccggaaaacacgcggtgattttctatgaacaccttgaccgcaacaaagcgtttttaacccagtttccgaagcagattcaaaatgaactgtttgaagccattaaaacgtgcaaccgtaaacaagcggccgaacagcttcaccttcttcttgagtcgatttgttctgaaaacatgaatccgcatcactgccagattgcgattgcaaggctgttgaacaacttgattgaatttatgcatttgctcggaatcgagatttttgaaccgaacgaaaatacgatgctgtacgacgacgtctttgagctgacgaccatcgaggaaattgaaagctggctgaacgcgcagattatcgttaaaatgatcgatacactcagcatcagagaagaatcgcaatacaaaaacatctcagaaaaaatcgtccatattatccagcaggaattcgacacggacttgacgctcgaatcgatcgcaggaaggcttcattacaaccccaattatttaagcagcatcttcaggaaggaaatgaaaatatcgttcagcgaatacttgtcatcatacaggcatcatatcgcgaaaaactggctgacggaaacgactatgtccgtaaaagaaatttccgaaaaactgaaatacaaaaatccgcagaatttcatccgttcatttaaaaagctggaaggaatcacacccggcaaataccgcgagctgaaaaaccattcggcataaaaagacaatcccggctcctcgggattgtctacattgttgacaaaatcccaaaacgacttttagttttgggattttgtcatcctttcagcgtgaatgaaaacccttgcagtctaggaaggccgagcatcggagcgcagcgaatgttggaattcgtgagcaccgacgcgcaggcctgacaacgaatgcgagggtttgtcgacacgctgacaatcccggctccccgggattgtcttctatttttctgcttttttaaatgactcctcatattcttctatgacttgatttccgccgttcgtgcgccatttttcaaccgctttctcgaactggctttcattgattttgccgagaatgaattggtatgtggcatcatcaatgatcttttgcagttcatcgcctctttcagatgcggccggtgagtacaggctttcggccgggtttgagacgatgatttcgttattgtcctctgtcagctcttcatattttgtgcggagcggatcgcccgtatttttcaaatattgcttatcaatgccgacgagagaaacgagcggctgaatttccgcctgccagtctttcagtttctcgtcgatccgtttgaattgtttattcccttcttttttatagtgaacgccttcgatcccgtatgtcatcagactgtaaacatcctcttcggcgatccggtcgaaaaaggccagaatcctcttcagctctttttctgttttgacgctagttttcgggaaggcaaagattccgttatgcccgcctgatgcccagacgcgttcctttccgtccggccctttgatccgattgatgatctcaagttccattttatcatcgacagactggtctcttagattgacggcatcaaccatatttccgacataaatgccggccttcccttgtgaaaacatttcttgctgctgcgttttgctcgtcaccggaaagtctttgttgatcagcccttcatcatacagctttttcatatatttcatcgtatccatgtactcttttgtcatgaagtcaggcgtgaacttgccgtctttttcctcccaatcagtcggcatgcccatataggaccccaatgttttaaaggcgccgtagatcaaatcgtttctgtcggcaaagccgatcgtatcgtttttcccgttttgatcaggatctttttctgtaaatgccttcgctgtttcgtaaagttcatcaactgtcttcggcatatcgagtccaaggttgtcaagccagtctttacggatgacgatcccctgtcttgataacgggcgctccctgtagatgccataaagctttccgtcgattgaagcgtttttattgatcagcttgttcatcttgcttaaattcggataatcctttaaataaggtccgacttcccaaaacatccccgatctgaatgcattcatgacagatgaatttttaatgtcctgaatggtgacgactttcggcaggtttccggcggcgagcgctgagtttaaacggtcctcttttaccgcatcaggcacccacattaaatcgagcttagtattggtgagttcctcgatttttttaatcgccgtgtccttcggcggctgctgatggtaaaggatcaccatccagctcaagtccaaaggcgagttcaaatcgactttctcctccttcgaagaagcctggtctgctccgctgttcgaacagccaagcagtccgccggccaaaagcacgaacgcaaaaatcgggatcagccattttttccccatattgtcccctccgtttttatcctttaattgaccctaaaagagcgccttttgcaaagtgtttttgaataaacggatacacgagcagcacaggtatggttgcaacgacaatgaccgccattttgatcgtttgttccggcggcgccgcggctgctcccatttccgtcatatccccttgcataccgcttgatacgatgacaatctggcgaagcaaaacttgtatcggccattttgtcgcatcgctcaagtacagaatcgcctgcatgtacgtattccaataggtgacggcgtaaaacagcgaaatcgtcgcgatcgccggcaaagacaacggaagaatgatgcggaagaagatgccgatgtcattgcagccgtcgattttggcggattcctcgaggcttgacggtatgttttgaaaaaagttctttaaaataatcaagttaaacgcattgatggcggtcggaagaatcagagaccaataggtatcgagcaatccgagcgattttacgacgagaaaggtcgggatcatccctccgctgaacagcatcgtgaacacgaccaagaacatcaggacgcgccttcccatcagctcctttctcgacagcccgtatgccattaaagaggaaagaaacatgctgaccgccgtccctacggctgtgacaagaatagaaacgattaagctcctgtacacaatgtcagttgaaaaaatatacctgtacgcatccagcgaaaaagtcgtcggtattaaaataaactttttcgaaataacctcctcgactgtcgcaaaagaggctgcaataacgtggatgaacggcagcacacaaaccaatccgaaccctgttaaaaatgaataattcaatatgtcaaacacgcggcaatgcctgatcgttattccccctccttgtaagcgctgtcaaaatattacgatatcgtgtctaaaatgtagcagacagaaaggagagcgtctataatcattttttaagcaggagcaggaaagcggagaaaaagatcatcaccttagaagatgatacgtcagtcttcatcaaggatgtcagaggcgctgacttgcggcctgtaccccagttcccgaatggcggaatcgatcgaccacggccgccccttattgtcgctgacagcataatatgtaccatatgttttgccggattcgatagcggctttaaagattccgatgaggtcggggtgggataaaagcgtttttttgcttctcggttttgcgtgcagcgtttctagctcattttcagcagctgtcccgatccgcagattgatgacggaaaccttggcgtctaattggtgcgagaaaaggtagccgagattttcggacgccaattttagcaagccgtacaagcttttggactgcgggtagtcatttgtgttgatctgcctccccaacagagaatcgccgcccttttcatatacatctgtcacatggttgctgctggcaaataccactttcggcacgccgagctccgccgccgcccgcaaaatcgtatatgtcgctttaaaaaagatatccgtcattttcgcaaactcctgccggtcaagcaaatcgcccgacggctttacagccaaaagattgatcagcgcattcgtctgtgcaggaatgcttttgacgacttcgttgtaatctgtcgcatccacccggataaaacggacagcctgtttgtcatccggttcttttaaatccagcactgtcacctcatacccttcgcctgccaatccgcccgctaatacgcggccgaccgtgccgttccctccgacgatcgtcacctttttcacggttatcgcctcctgttttacagccatgtttttaagaaaccgaccgctttatgcctcattccggctgtctcgaggtgccctgaatgagaacgaaacacttcatagcgttcacctgcgcctttttctatatacacatcggacagcttttcttcaataatgtcaatcccttgaaccggcgtcagtttatctgcggttccgaccaggcttaaatgaggccttggagcgatcaagctttcgatttgagcggttgaaaagtgtttgaccagccctggaacataagaatagagattgtggcggtccaaattctgcgtcttgattaatgtttcgctgtccacctgagcgcatatatcaacgcatacgctgacccgctcatccaatgcagcggtccaccaggccatcagacctcccatcgacatgccgagtgaagcgatgcggctttcgtctatgtcctccctcattttcagataatcgatggctctgatgctgtcgaaaaccatcattccccacatcacccgccctgtccaaagcatttctttaaatatctcactctccgttttgccccgcctgtctccgaaagcccaatgatcaatcgcaagcacggagaatcccaaagccgtcaattcctcggcgaacggcggcgcttgcaagtactccgctccttcaaccagctcctcctttcccctttcgtagcgccctccgtgtgaatgacagtaaagcacggccggccgcttgccgttcatctgtttcggttttgcaaaataggccggcaccgcttcaattccgtttaaatcaagcaaaagcgtttcgagaataaaagatgacttttcttcgattttaagagtgctcgcatcaatgctttttttccccggcaaatcgccgagcagtttgaaaagttgactgcgcatcgtattcccctttcttttttcgtttgattcattaatacgatttgaaagggcgttttacctttttccagatgttaagttggcggaagttcacaacaaacaatgcgctggcaagcatgataaacagtaatacccacgatgatgaaaacaaaagaagcagcgtgaagcccccccatgagaaagaggcatacttttttgtaaatgcggcctgataacagcttgtaagctgcggcaagaccgcacagcgagttgcagatgaaaaaggcgtttgcgatcagaaccagcgtctcaacattaagaaagtgaaacatcaggcagacgaaaacgatcgtatggatgagaaatataagccccagcgctgcagtcggctgatttccccttgatctgtaggcaaacagcccgccggcctgcgaggccaccagcctggctgctccgcctgtcacctgaaaataagcacacatacagaggacagcggtgagcactgcgatcaccggcaatgcaaaagatccgaacaacggcgtcagcatcatcgccagcttcaattgtccgtttgcgaagaatccaggatcaatccactgaacagctgccgcggtcgccaaatatatgaccgttaccgtcaggctgctgatcacgacagcccgtggaatcgttttcccgcggtttttcacttccatgctgtagttgccgacgatttcccatccgaccaatgcccagaacaggagcagcaatccgcggccaaaatcggtaaactgaaatgttccgtctacgagaggcccctcacggaagtaaggcacggaagcccgctgcttccaaacaggataagcgccgcggcagtggaaaaaatgagtgcaaccatgccgacaaatgaaagattaaagaaaaggataaccatacaaaagatgaaaaaaacaaagccgtacagttcagcagggaatgccgtgcctgccgcaagaaaatgaatatattcgccggccgtcattaatacggcggcggggccgaagctcgcagccatgataaaataaaagactgccaactttttaacacgcgacccgaacgctttttcagccgcataagcaatcccggcatcattcggatactcgacgcttaatctggcaaaaacccaggcaaataaaaaaccgattcccagcatcaacagccacgcaaaaatcgcgtagtctccagctgtctgatgaatcataggaggcagcagaatgattccggatcctaaaatgggccccgtcatcagcccgcttaacaataaaggaccaagctttttttctctcatacgaatacaatcctttcacaaagtcgtttaaaatgattgtaatcatgttcgattcatcagtaaaatagatattatcgatctgcaacttcgaatttttcgatataagataaaaaagggagatggacgagatggagatccgacacttgaaaacatttaaaacaatcgtggatatcggcggttttacccgtgctgccgattatttaggatatgcacagtccactgtgacttcgcacgttcaagcaatcgaacaagaattaagaaagccgctgttctaccggctcgggaaaaaaatgatgctgacagaagcgggaaagcaccttctcccttatgccgcagaaatggtcgagctgtatgaaaaagcgaggcacattccggaaaacgaccaggagccgtcgggaaacttgatcatcggcgcctcggaatctttaacggtatacaggctgcccgccattcttcacgaatttacaagcaaatatccgcaggtcacggtcactttaaagccttccacgtgctggcagctgagagacgaattgaaacagggaaaaatcgatgtcgcttttcttttggacaacgaccggaaagaaaacgaccttcatgttgaaaagctggtcaatgagccgatggtgttcatctttcccaaagaacacccggcaggacaaaaagctcttgatgatttgacttttaacgcaaatgaaacgtttttatataccgagcacggctgcagctaccgtgatttttttgaggaatatttacgtcaaaggggggtcattgccgaccatacgatggagttttggagtgtcgaagcgattaaacaatgcgtaatgtgcggtttgggcgtctcccttcttcctttgatcacaacgcgcactgatatcgaagaaggaaagcttcagggcacgctggtccgcgacgccctgttttccactcaaatggtttatcataaaaacaaatggctttctcctgctatggcggcttttacggatatcgtccgcaggaaggcaagagaatgggaacagacataacatccctatatgccttcggtattcatcagcacgatccgccagccgtccggatcttccaccgttgcccctttttccttccaatacggattttcaggcggcacttcgtcatagcccatgtcagcgagcctatttaatatgctcctgatttcctccggatcaggaatataaaaaacgagcagattgtctttagtcggtgccggacaagggcttccttcgatatgtgaggtgaattcaaggtggtattggacattcggcaggccgaacatgacgccattatacccgtggtggccggaaaaaccgccaagctttttcagccccagccccttttcgtaaaatgcaacgatttcgtcaaaacggtctgtaggccgggcgattctgacctgtacggcggaaaaatcggaaaaatgcatcatgatcatctccttttttcccattttaagcggtcatggatcatttgaaacgaagcgatcgtctgaaatattatcatcctttcggcggaatgacagaaaaagccccttcggattgaaggggctttcgccattaatttgcaacaatatttacaagctttccaggcacagcgatcacttttctgatcgtttttccttctagctgttcttttactttttcattgtttttcgccagctcttcaagctgttctttgtccgcgtcggctggaacgttcagcttcgctttcacctttccgttcagctgaacgacgatttcaatttcatcatccacgagcttcgcttcatcatagacaggccatgcttcatacgcgatcgtttcctcatgaccgaggcggttccagagctcttcagccaaatgaggcgcgacaggagaaagcaatttcacgaagccttccatgtattctttcggaagctgatcagctttatatgcttcattgatgaagaccatcagctgtgaaatgcctgtattaaagcgcagaccttcgaaatggtccgttactttcatgaccgtttcatggtagacgcgctcaagcgtttcgccggctccttcaacgatcttctcgtttaacccgccattgtcatcgataaacaaacgccatacgcggtcaaggaagcggcgagctccgtcaagccctgtcgttgaccaggcgatcgatgcatccaaaggtcccatgaacatttcgtacagccggagcgtgtccgcgccatgcgtctccacaatttcgtccggattgacgacattgcctttggatttgctcattttttcattgttttcgccaagaatcatcccttggttataaagctgtttgaacggctctttcgtcggaacgaccccgatgtcataaaggaatttatgccagaagcgcgcatacaataagtgaagaacggcgtgctccgcccctccgatatacatatcgacaggaagccattcctttaatttttcaggggaagccagctcgttcgggttcttcggatcaatgtagcgcaggaagtaccagcagcttcccgcccattgcggcatcgtattcgtttcgcgtcttccctttttgcctgtttcaggatctgtcacttccacccattctttaatattcgcaagaggggactcacccgttccgctcggtttgatttccgacgttttcggcaagatcagcggcagctcttcttcaggaaccggagtcgatgtgccgtcttcccaatggatgatcgggatcggctcgccccagtagcgctgacggctgaacagccagtcgcggaggcggtatgttacttttttctcgcccttcccgttttcctcaagccactggatcattttttcgatcgcagccgctttatcaagaccgttcagaaaatctgaatggatatgttcgccgtcgcctgtatatgcttctttctcaacatccccgcctttgacgacttctttgatcggcagcccgaatgctgatgcaaattcatggtcccgctcatcatgggcaggaacggccatgaccgccccggtcccgtatgtagccaagacatagtccgcaatccagaccggaattttttctccgtttgccggattaaccgcatatgcacctgtgaagacgcctgtctttgttttggcaaggtctgtccgctccaagtcgctctttgattgaacttcttcaatataggcgttgactgcgtctttctgttcaggcgttgtgattttttgaaccaaatcatgctccggagccagcacggcatatgtcgcaccgaataatgtgtcaggccgcgtggtgaaaaccgtaaacgtttcattggtgccgtcgaccgcaaaatgaacatgcgccccttcagaacggccgatccagttgcgctgcatttctttaatgctttccggccagtcgagttcttccaggtcttcaagcaggcggtcggcataagcggtaattttcagcatccactgcttcattggacggcgttctacaggatgtccgccgcgttcgcttttgccgtcgatgacttcttcattggcaagaacggttccaagcgcaggacaccagtttacagggacctcatctacataagcgagacctttttcgtaaagctttaagaaaatccactgcgtccatttatagtagtccggatctgttgtgttgacttctctgtcccaatcatacgaaaagccgagcgctctgatctggcggcggaagttgtcaatgttctgctcggtgaagacggcaggatcgtttcccgtatctagcgcatattgctcggcaggaagcccgaatgcatcccagcccatcggatggaggacattgtacccttgcatccgtttcatgcgggacaaaatgtcagttgctgtatagccttcagggtgtccgacgtgaaggcctgcgcccgacggatacggaaacatgtccaatgcataaaatttaggtttggatttatcttcacgagtggcaaacgttttatttttcagccaatagtcctgccactttttctcgattgtttgatggtcaaagctcaattgtaaaaacctcctttgaatatgtgtacggcttctttgtcttcaagtatggacgggactggcagcgttatattcagattattctaaaatcaaaaaaactctcccatccctaagaagggacgagagatttcccgcggtaccacccttgttagtgtgcacgcggcacactcacttgatatctgtaacgcagatacgcggcagcagcttatcactgctgcaactctgaggcgagttcggaagctcatttgattgactttcaccagccgtcaactctctgaaacaaaatgggcttcttactgctcctcttcactgttcttgccgtaaccgtaatcttatctgtattttatagaattctgttcataagtgcaagcaggtttgtatacaatgggaatgtgctgaaaaaagggtaagagtgaggatcttaatcgtgtggagatttgttttgccgttcggagttctgtacatttgcctgctgttctctgacaaagtcaaagcttctcaatacagcttcaccgccgtagccggcaatgatcgataacacgacaagctgaattcccgaatcaggttccgcagataaaacaagcaaaatagaagcaaccattccgacaagaatatcttcaaaaaatccaaggtaaatgaatcgtttcgttgttctcggtttctcgagtcgtcctctttttttaacgtgcccgagaacccccataatccctccaatcaaacaagcaaccaaaacttgatgcagcatcttcatcaccttcctaaagcccttagtttagtcaagcgacttcaggccatcgagcagcccccctagaccccttgcgatgatattcgatactaccatacagaaaatgtgttctgtctgagaagaaaaaaagcttgtttcttccattatatgtgaagatttggttgataatcttgattccttcgattcattttcgaataattacaattacctattttttctatattactcatgcatctgactgagcggagagctgcttttccttcctgtcgtataaaaacgccgttcctattgcaatcagcagcaatgcgagcagaaccgcgagcaaaagctgcatactaaaataatcaaccagcattccgccaaaaagcggtccgatcattcttccgccggtcgccatactgttgacaaacccttgataaaacccttctttccctctcggtgcgagacggtttgcaatcgtcggcacagccggccatacaagcatttcgccaatggtcagcacaaccatcgcagcaagaaaagccggaaaccgttcagcgccaaacaaaattccgtatgccatcataaaaatgacaaatccgatcacgatttggtttttcagcgattcggcaaaccgtttcacaaaaaaaccgatcagcggctgaccgaaaacgatgagcgccccgttcactgtccaaagcacgctgtactgcccaagagatatccccagctcctgggtatgtgaagcgatggtcgaggaccattgcgaataagcgatccagccgagcaggtagcccgtacatatgaccaaaagcgcagaaaatttcgatttcccgctgactgaatcggcatgatccaaaacagatgactgcatggctttttcagaccggatgcgtttaaatccgaaaaacgcaatcatgaagaagacggcgtacagcatcgcattcgcgagaaaaacatacgtaaatgaaaaagaagcgacaattccgccgagcgctgagccaactgccacacctgcattttgggccacgtatacagcgttgaacggctttctgccgccttccggccaaactgatccggccattgcatagcatgccggaaaaacgatccctgatccaaaaccggccaacgttaagaaaagaatgtactggaaccaatcgtgaaaaaagacgaggccagaaaggctcgcaaacgtgatcacaattccaagaacaaccgttttaaatccgccgattttatcgaatagatatcccccgaacaggttgcccagcacatttgcccctgagttcagcatcagcacaaatccggccgctgtcagcgactttcccaaatgctgatggatatagatggtattcagcggccataaaaaagatgcccccgtgacattgataaacattccgatgaccaaaagccataatgtgcgcggcatagcgtttccttctttctctttatcattccctctagattctattcgttttgcccatttttttcaattgacacgttttcgattttcaacataaaaaccccctttttaaagggggaatttttttatgattgcgtcatccatttcggctttccgaaaccggcgaattcccgatcgatcgtctcctcgaaagctttggattttaccgcttctttgagatctttggcgaatggcttgtctttgtttttttcatccactaccacttggttgcggtagcggtcgggcatgttctcaagcgctagggcgtcctgcagcttcatattggcggagagagcgaaatttcccgggacggccgcgatatccaggtcatcgacagctcttggaagattggcggattcaagctgtttaaatgtcagctttttcggattttccgcaatgtcctgcacagaggctttcaatgtgtcgacatcgcttttcagccgaatcagcccctgatcctgaagggttaaaaatgccctggcagcattggccggatcgtttggaacagccacttccgctccgcttttgacatcgttcaagtcgttatatttggcagaatagagccccatcggagcagtcggcacagaaatgagagccgcaagatttttattgttttcttgattgtatgatttcataaaaacctcatgctgaaacaaattagcgtcgagctcgccttcacttaacgcagtattcggctgtacataatcggtgaattcgatcacctccactttgtagccttttttctcaagctcaggttgaatcgcttttttgaccatatcgtaatacggtcctgcagtggcgcctattttgatcgttttgccgtcgcttgcggcattgtttccgcacgcggccagaagcgccaggctcaaggccagtcccagcgcagaagtccattttaataacttgttcatgttgatctcctccttcaaaataaaaaaactctttcagccgcctgaaagagttgttcaacttatctttcagaatgcgcctgacattctgctggatttagcaccttgcactgctgcaggttgctgagatttcaccgggccagtccctccatctctctttataagctgcatattcggtttttaaatgatttctttattttacgtttgaatatttagatttgcaagaagttttttcggtataaacatttttttctttttaagctaaaatatagttatcaattaagaaaggagacgaatcatggaatctatcatgctgatcgggtttttatccttccttttttccatctgctatcttgtatttcatttgatcagaaggattttttctccaggcaaaaggttttccaggaaactcttttatccttgttttgccggcggacttctcctcctgatcatctctgcaccttattacgatgaggaaacatatgccgccgatgagaaaaaaacggaggatctgacaaccgagcttcaggaactgaaaactgaacacagcgctttgcaaaaggagcaaaccgcattaaagcagcaggtcaaacaggcaaacaaaaaactgaaggcagtcaaagcggagaatgacacattaaaaaaagaaaacgaaaaactgacaaaagaaaaagattcgcttacgaaaaaaacaaaatcgctgacagaaaaactggccaaggctgaagaaaaaagcggcagtgccgaaacctctgtaaaagaaaagagcgccgccgctcaggccgaagcgtcacacagcacgcccgccgccaagaaaagcagcgctgaaagcaaacaggagtgcaaaatcaaaggaagcgtcaaccatatttatcatacaccgggcagtacatattatgaccgcacgaaaaacgtcgctcgctggttctgcacagaacaggaggcgcgtgatgcggggtacagaccgccaaaacgttaaaaagccggcataccgccggcttttttcctaaagctctcttcttaatgctgtcagcacgttcgttcttgtcgctttaatggccggattcaggccggaaagaatggcgacacccgcactgatcaatgtcgcgatgaggacaagactgaccggaatatgcgagaaggtgatactgagctctgccgcactcgcttctccttctgaaaccgatgataaaatgacaggtataatcttgttcactaaaaagctgacaccgtatgaaatgataatacctaaaacagatcctaagatgccgatataggcgctttccagcaggaacatttttcggatcacattcgggcttgcaccgatcgctttcataatgccgatttcctgcgtccgctctgtaaccgccattgtcatcgtgttgaaaatcccgatcgctgaaatcaagacggcaatgactccgacaaagatcagaccgattttaaaagccatgaaaaaaagattgatgctatcgagctttttcgttattgaatcgacgtagtagccttcatcctccaaatctgttgtcagctgtccgacatgttcaaagttatccgcgtaaaccgaaagcgttttttcgatcatgccgctgtctttttccgacttcagaaagccggtgatgtctttttgcatgccgttgctgacatagactgttgaatcgctcgcccattcatacgaaggtttttttgtcactccgacaactttcagatcatatgttttcgcttccccttcttctcctgttttttcatccatttttgagatctttaattcaatcgttttgccgagaatatcttcttcgtatcctttcggctcttttgcttcctcagcattattttccatctgcttttcataatctgcggcttcctttttcgtccagaggttcttcccgaaatggtagccgacgacaatttcattcggtgttttcgctacgcggccgcgatcgagtttgatattggctttttgctcagcggccatgtcggtaattgtaatattcgacatttgattattggtcctgttgcccaattttgcttcagcaggtgcgaacacgtttgtgcgctcgataatcgcggacacatctttgcggttttcaaattctttcaggtctttcttttgaaccttttgatcgctttgcccttcttttccgacaacatttatctcggtcacgatctgctctttcatcagctgttcagtcattgatttttgcagtccgaatccgaccgatgcgagcacgattaaaaacgcgcaggccaccgttgttgcgagaatggtcatgaatacacgcaggcggtttttcttcatatttcttctaatgaacttcaactggtccttaaacttcaacagtctcttcccctttctctaacacgccgtcagataaatgaaatttcgtattggcgatcgatgccacctcatcatcgtgcgtgatgatgacaaatgtaatgccgcgttttctgttcagctgccgaatgaattcaaggatttcctgctctgtttcggaatccaggcttccggtcggctcgtcggctaaaatgattgaaggattcaaaatcaaagcgcgggcgatgctgacgcgctgctgctgtccgcctgaaagctcattcggatagtggccggcgtggttttcaaggccgacgcggtggagcatctcgttgacgcgctgcttccgctccgacggatgaacaccttttaaagtcaggggaagttcgatattttcgaaagtcgtcaagctcggaatcagctgaaaactttgaaagatgaagccgaaatgttcaagcctgaatgcggcccattctttctcgctgtacttcgtgacatccgtgccgtcaatcatgatcttcccttttgtcggggcgatgtagccggaaatcaagttcagcagtgtcgactttccggagccgctccgtccgacaatacaggcgatttctcctttttcaacggtaagcgagacgtcctttaacaccttaatttcattttcccttccctttttgccgactttaaacgagtggtgaatatgctttacactgatcatttgtaaatctcctctccattaatgattacagctgttttatttttttgaaaatcaagaagtaactgattaaaaatccgactgccgaaccgatcaacataccgaatatatagctgaacagactcgaagcagcggctgtgccgaatccccagatgccgaataaaatcacgagaatctggatcggacgatccatttttctccaaaggaaaaaatgtccgttccgttcaagctgctgtttgataaagcagaaatagccgattatataaaacaagatccccatggcgagcggaataagcgtaaaggccaggctgccgtcttgaatgccgaaactgttgaggtatatgatcggcgttatataatctagtagttctgtttcaccataaaagaaagcagggtcatgcccaaagaaacccaggatgattcgtaagttggccagcggaaggccgatcagcaaatacggcagaatcgacgctgaaaaagcaacgatcatctgggccagcggattgccggtcatcgcgcccgccgccatgacaagcgagtagaccataaagcagaagataaccgccccgataaaatactcatggaaaaagacaacgtcaacgttatacaaaataatcaaagcgtaagataacaagtaagataatagctgggctgttaaaagaattgaaatgccgaagaaatatttagtattgaaaatgacgccgcgcttgtaagggaggccgagtgtaaagtcaagcgttcctctgctccgttcaaacccgatctggctgatcgcaagcgcgactccgccaacccagaacattctcatggccccacttaccccataatctttatataaaacgcactctatatcgggaaattttttctgttctgcaaggcatccctggtactggaaataatcattcaaaatcgcaagcggttcactcagcaacaccgctgcaaaaacaactaaaaaaatccagaaatgctgtttccattctttatataaaagtccgcggtctaccatcttcgcttacctccatacttcgcgatgaatacttcctcaagattgaccggaagctcgttccaaactttcggagacaaacttttaagaaattgtttgctcacattgtcttctttcggaaccaataccgtataaaagacgccggtgtggtccaaaacagggatttccctttccctgatttttaaattgacatcttcttcaaatgccatttgaattttaataaaatcgcctttcagttcatcaagatccatgatgttcgacaatgtattgtcttcgagaaaaccgattcggttgcacattctttcaatgtcctcaagccggtgagatgtgatgagaatcgtcgtgttgttttcagccacttcatctaccatcagctgaagaacgtcttgtcttgtgacggcatcaatgccgtctgtcggctcatcaagcaggatgaccgccggccggatcgcaaatgacaggatcagcgacatttgctttttcaatcctgtagacaattccctgtacttttttgtttcgggaatatcgtatcggttcattaattcatttgcatatgtaacatcaaagtccggataaatgttacgcaaaatattgacgagctgtttgtaattgtatttttcgaaataggtgttttgaacgggcatatagacgatgttgcgcttgacgagcggatgatccttcaccttgacgctgccgaaaaagatatctccctcatcaggcagcaggatttgctgaatcaggcgaagaagcgtcgtttttcctgagccgtttcttccgagaagtccgaaaatctctccttcctccagcttaaaggagatgtctttaagtatttgttttccgtcaatcgtttttgaaacagatttgagctcaatcattcacttcgcctcctctcacttcttcgtcgatttccgccatccactcctgcagctttttggtgtcgatccccgcgtaatgcgcatcgatgatcagctgctttaactgctctttaatcatcgcaatcttcccttcatcaagcgtaactttcgcgttttctgaaatatacgttcctcttcccctcaacgtttcaataatcccttcccgttcaagttctttataggctttgctgaccgtattcgggtttgcaatgataatggttgcaagctctctgacagaaggaagtttatctccaggcttgattatcccttttaagcacagctctttcatctgctggatgatctgctcatagattggggttgagcttctcggatcgatttgaatcatctatctcccttctttctcgttcaatctcagcgttattcacttttaaaaaaacacatatcccaaattttcttgaatcataaagcccagcttcgcaagtacaaacaagaacgaacaggcaatgataaacgccacgacaaccattggcgttacttttttatgtttatcactcatgagtattgctcctttacatgtgtgtgttaactgtattactcgatgtagtacacttaatacaatatagacatcgtccttttttgtcaatcgcttttttcaaaaaaatgaaccctttcaaaaagggttcatctttcatacgatctctgcagaatcatattgttttgaagggtttgcagctggagccttttgcggtgaatttcctccctttgctgctcattggcaaacagcgaaagcttgtttaattcattgaccgcgttttcaagcatcagctgcgcatcgctgtactctgtctcattgtaatgttcctgcctgcttgcagtttcaaattgagataaagcataatcataagcatcttcgcttctttggatgtgctctccgacggattgtcttgtagccaaagaaaacccctccttaatggaaaaatccatcgtgattagtttggccatcacagctgtgatcattgaagaaaataattgggaatcggtttgttcttatcgtgtttatttgctacaattttaggatgcgtgatactaaaaggaggtccttttgtttgcatcagaacaacccttttccatatacgaacagtgaaaaacgatatcatacatggaattatcatttaagaaatcatttcggtcataaagtgtttaaagtcgcccttgacggaggctttgactgcccgaaccgcgacggtacggtcgcacacggcggatgcacattttgcagcgccgcagggagcggagactttgcgggaaaccgcgccgacgatctgattacccaatttaatgaagtgcgcgacagaatgcatgaaaaatggaaagacggcaaatacatggcgtactttcaagcatttacgaatacgcacgctcccgtcagcgttcttcgcgaaaaatacgagaccgtcctcggccttgacggcgtagtcggcctttcaatcgctacccggccggattgtctacctgacgatgttgtcgaatatcttgccgagcttaatgaacgcacatacctctgggtggagctcggccttcagaccgttcatgaacggacggctgatttgatcaaccgcgcccatgatttcgactgctacgtggaaggcgtgaacaagctgaggaaacacggcatccgggtctgctcccacatcattaacggactgcctctcgaagaccgcggcatgatgatggaaaccgcaaaagccgtcgccgatttggacgtgcaggggattaaaatccatctgctccacctgttaaaagggacaccaatggtgaagcagtatgaaaaaggaaaattaacgttcctttctcaagatgaatatgtccagcttgtttgcgatcagcttgaaattcttccgccggaaatgatcattcaccggattacgggtgacggaccgatcgaattgatggtcggaccgatgtggagcgtcaataaatgggaagtcttaaacgccatcaacggggaattggaaaggcgcggcagccatcaggggaaatggttcaacaaggcgaaagaaggcatggccacatgaagctcaagaaaatcctcccgtatgcgaaagaactgctgaaaacagccgcaggcgaaggagacatcgtcattgatgcgacaatgggaaacggacatgatactcactttttagctgaacttgtcggtgaaagcgggcatgtctatgcctttgacattcaagaagcagctcttatgaatactgccgaaagacttggaaacgagtataaagaccgggtgacattgattcaaaaaagccatgatgagctcaccacttcgcttcctgacgacatctcaggcaaggtggcagcagccgtgtttaacctcggatatcttccgggaggcgacaaatcggtgacgacaaaaagcgattcgaccatcgccagcatcaagcagcttctcaaaatcctgaaaaatgaggggctgatcgtgcttgtcgtctaccatggccatcccgaaggaaagcgggaaaaagacgccctgctcgaattttgtgcatcgctcgaccaggatacggcccgtgtcctctgttaccaatatttaaaccagcgaaacgatccgccgtttatcattgcgatcgaaaagaaagaagcggtccaaaagtgacagcctgaaatcctccgtttggaggatttttttcattcaaacataatgtaagcgatatcaaaataaaatatgaacactttagatttcggaattttctaaaaaaacaccaaataatggaggtggtttcactctttgtcgcgaaattattgaaaactcatggaaaatacggagggatttcgctttgaaaaaatttatcgcttatcaaattttgatcgcactcgccattggagcagttatcggacatttcttccctgatttcggaatggcgctgcgccccgtcggagacggatttatccgtctgattaaaatgatcgtcgttccaatcgttttttctacaattgtcatcggagcggccggaagcggaagcatgaaaaaaatgggcagcctcggcatcaagacgattatttggtttgaagtgattacgacgttcgtgctcggactcgggctgcttttggctaatgtgttaaagcccggcgtcggccttgacctttcccatttggccaaaaaggatatcgacgaactctcgggctacacggaaaaagtggtcgatattaaacaaatgatcctcgatatcattcctaccaacatcgttgacgtcatggccagaaatgatttgctcgccgtgatcttctttgcgatattgttcggcgttgcagctgccgggatcggcaaagcctcggaacctgtcatgaagttttttgaatctgttgccaacatcatgttcaagctgacgcagatggtgatggtcacagcgcctatcggcgtgcttgctcttatggccgcatccgtcgggcaatacggcatcgagctcctgcttcctatgttaaaattagtcggcactgtttttctcggactgtttctcgttctttttgttttatttccgatcgtcggtcttgtttttaaaattaaatacttcgaagtcctgaaaatgatttgggatttgtttctgatcgcgttctccacgacgagcacagaaacagtcttgccgcagctgatggaccgcatggagaaatacggctgcccaaaacgggtcgtttccttcgtggttccttcaggcttatctctgaattgcgacggctccagcctatatttatcggtcgcctgtatctttttggcgcaggctttcaatatagacatgagcatttcccagcaattgctcatgatgctcgtgctagtgatgacaagcaaagggatcgccgccgtgccatctggctcgctcgtcgtccttctggctaccgccaacgcagtcggccttcccgctgaaggagtcgcgattatcgcgggagtggaccgcgtgatggacatggcgcgaacaggcgtgaacgtgccgggtcatgctgtcgcctgcatcgttgtttctaaatgggaaaaaagcttccggtataataagcgctttgtgcttgaaaaacaataccggacggaaagcttataaacggcaaaagctcaagccgataaacggtttgagcttttctttacgagcttttcatccacggcattttttgaattttgcggtatgccctgccgttaatatagaaaaagaaagatgttttgccgctcgctttaatcagctttttcgcaagccggccgatttccttctggcccgctactttgtcatccgacaaataaacgcctaacagtcctctgttgatcaaacggtgaaagttttcgtgcggaatcccgcgcaaatgttcatccgccatttcgatgaaatattcgagcctttccatcatatctgaatgtgatgggtaataagtgcagaaattcaaatccccgccgattaaatcttcctcctggtcaattaaataatcgagcaggatgtgcagtccctgtatgtacggaaaatagctgtcgcggatctttccggccatcgattcagtaaaatcgggacggacggaatacgatacgaggcagaagatgccgagcgttgaacccgcacaggccgagaactcataccattccattttcggcagagccgatttataattctcaaaccacgcttcgagccggggaacacgctcatgctccactacgtgtttatgaacttgcaggtcgcaatagtagctgcaaagctcaatcagatgctccttgatcagatcatagttctcaatttccgcaagcacgccttgacatgttttcactaagtcgtgcaaatagccttgatcatcctgatcttccctgaaccggtaatagtttttcaattcagccccgactgtcagcgcgtctttcatcgactggtgaagcatggtgaaatcatccggatcaagcgaggtgctccggtcgcatagattgtcgaggtagtcgcttatcgtctgatacgccgtaataaaccggatcgactgctcgattttgtctcctgaaagaagggccataatgccgccgccttcacagtgaaaggttttatccctgatgctggctttcgcctgcgttttcagttcgggattttgaatcgtttcagcttttcgtttccacttgtccaattcctgatgaacaaggggaaaaacctctctgtatactttagccattaatccaaaaggatgctccggtactgccaaagaatgcacctccattatgttatatactgctccgcaaacgctctggccgctttaaaaacgtcttcccgttcaggctcattgaaaatttcgtggtacaagccatcccattccctgtacgtcttattgtgggaagcaagctggttaaaccacttgacgaccatttttttgtcgacaagccagtcggtgcccgcctgcatgacaaagagcgggatgttgagaaaggcgtccgtcggctccatcgcgcttttcaacgcttttaacatttcttgataccatctgacagaaacttttgtgatatataatgaatcgttgatgtccatttcgatgacttctttgtttctcgtcgctttatcaggcgtgatcccggattcaaaccgcatagacggcgccaaaacgttgagccccttggaaatcaagtccagaaatttgttcggctttaattgcagcccgagacaaggggatgataaaatgagaccggcaatgccgctttgctgctgcttaaaccattcgatcgcaatcaggccgcccatgctgtgcccgagcataaacacaggcagttcaaatgctttcgccctggcgacccatttgtccacttcatcaatatattcttgaaaagagcgtatatgtcctctttctcttgtcgaagttccctggccgggcaaatcccccattacgacattaaagccggatgaacgccacatttcggacagccatttataccgcccgtgatgctcacatgcaccgtgaatgacgacgattgtagcaacaggtctttccgcttccatgcaccacatgctgaccacctcacacaattttataaatgaaaggatgaaacctatgatctacccttataaaaaaacggaacccgttattcatgaaacggcgtttatcgccgacaacgcggtcatcaccggtgatgtaacaatcggagagcgatcaagcatctggttctcttctgttatccgcggcgatgtcgccccggtcagaattggaaaaggtgtgaacattcaagacctttcctgtctgcaccaaagccctgaacgccctctcgtgattgaagacggtgtgacggtaggccatcaggttacattgcacagctccgtgattcgaaagcatgcccttatcggaatggggtcgattattcttgacgaagcggagatcggggaaggcgcttttatcggggcgggcagccttgtcccgcctggcaaaaagatcccgtccgggcacctcgcattcggcaggcccgccaaagtcatccgtccgttaaccgacaaagataaacaggaaatggaaagaatacgcaaagaatatattgaaaaaggacaatactacaaatccttgcaaaaaaaagattagctttgctacaactttaccatttttccaccgataatttaagcaaaaaccttttcggccgcacgcgtctgcggcttttttctttttccgaaatctttacaaatacttatcatttgctaaacattcattttttacaataaaaaatgaagcagccatacatgtaaagggggttaggacatttgaataaactgatggttggcatttacaactttgaatgccggattttcctcggtatgaacagattatttcatcaaaaaacactcaaccgttattttcgttcctcaactcatttgggaggggctatgtgcacgatttctgcctgcctgtctctcttgctgttcggctcgggaagtgttcgtacagcggggatggccagcgcccttgcacttttggtcagccaccttcaagtcatgctgatcaaaaagctgtatccgagaaagcggccgtatttaacgctaaaggaaactcaggttttgcaaaatccgctcaaggatcattcttttccatccggacatacgacagctgtattttctgttattacaccgttaatgatattctttccgatactcgcgcttttattaataccggttggcgtcagtgtggggctctccaggatttatctcggtcttcattatccatcggatgttctggcaggcacagccctcgggatttcagtcggaaccttgtcggcgatgatcttctaagccggccgtttcttccaaagcgtcactgatttttcacacacaaacaggaggggaaacgatgaaaattgcgatatttacggacacgttcacaccagatgtgaacggctgcgccagaacgctgaaaaggtatacggattatcttgaaaaaaacgggatgccctataaagtatttgcgccggaaagcacgcatgaaacacaattttcgagccgcatccgccgttttacgagcatgccgttcttcttataccccgagtgcagaatcgctcttcctaatctcatcaaaatgaaatcagaactccgcgaattccatcccgatctcattcacatcgcgactccttttaatatcggcctggcggggctcaagcttgcgaagaaatggaacatccccgtcgtaggctcttaccataccgattttgaccagtacctttcatattatgatcttcaaatgttttccaaactcttatggaaatatatgctctggtttcataaagattttcgaaaagtttttgtgccttcgcgcgaaacatttatgcagcttaaagccaaacaattcaggaacctctccatctggaagcgcggcgtggactgctcgcagttcagtccggcgcatcaaaccgaacacatccgcaagcgatacggcataaaggaaacctatatcctcagctatgtcggaaggcttgcacctgaaaaagacttggagacgctgctcaagatcgcaagtcaccccgctttgaaagatgacgtccactggctgatcgccggagacggcccgttaaaaaaagagcttgagaagcgagctcccctcaacatgacttttgccggctatgtcaaaggagaagagctggcaagcatctatgcgagctcagatttgttcgtctttccttctccgacggaaaccttcggaaattccgcccttgaagcgctcgcctgtgggacgcctgttatcggggcagactccggcggcctgaaagattttatacagaacggaagaaacggttttctttccgaacctagaaatccggaagcattcaccgcaaatatattgcgcgtcctctccaacccatcgttaaaaaaacggatggcatacgaagcgagaagctatgcccttacccagtcgtgggacgtgatctttgacaatctcctctccgaatgtgaaagcgtgcttgcagatttatcagcagaaaaaacggcataaaaaaagaaggttttcggttaatcgaaaaccttctttttttggcttaaacaataatgacctcttttggctgatggttcagctcttccggtacaaagcgtttttcaacgaaaatgctgtgccagatcataaagatgagaaccgtccagattttgcggctgttatccgctttgttggcgcagtggtcttcaagaagctgaagcacgtaatctttatggatatatgcatctgtctcgctctctttaatgatgttcacggcccagtcatgcatttcgtttttcagccagtggcggatcggcacagggaaccctagttttttgcggtttagcacgtgttctggaacgatgccttccgccgcttttctaagaagatattttgtcgtgccgtttttcgttttcagctcttcgggaattttggaagccgcttcaaatacgactttgtccaaaaacggaacgcgaagctccagcgaattggccatcgtcattttgtcggccttcagcaaaatatcgccgcgcagccatgtgtggatatcgacatactgcattttattgatttcgctgtaggacctgctttcttcaaaatatggctttgtcacgtcacagtaagacaggttgctgtcatattggcgaagaagttttgatttcatgccttcttcaaaaatctttgcattgccgatatatctatcttcaagaggagtacagcccctcattaaaaagcttttccctttcattccttccggcatcgctgaagctacgcgcagaagcatctttttcagcggggacgggatccgctcaaacggctttaatgaaagcggctctcggtaaatattgtaaccgccgaacagctcatctgccccttctcctgacaaaacaaccgtaacttgcttcttcgcttccttcgcgacaaaatacaaaggaatcgcagcagggtctgccagaggatcatccagatgccagacgatctttggaagctcgttcatatattcctcaggggaaatgatcgcgctgaagttttccacgccgaccttatcagcggtttctttcgcaacgtcaacttcgctgaagccttcatgttcaaagccgacagagaacgtctttaagttgggatggaattgcttcgccactgacacgataaaggacgagtcaatgcccccggaaaggaaggaacctacaggcacatcgcttcgcatatgaacttttacagaatcaaagatcgcgtctcttacttcctgaacaagcttgtcttcttctgtctgaaccggcttgaattgaactttccagtatgttttaaattgaatatcctcacccgggcggacggtaaactgatggcccgactctactttttgcacctttttgtccagcgtctcaggctccggaacgaattggaacgatgtatactgctgaagcgctttttcattcaattccaagtcagcatcgacagccatcaggctctttctttctgacgcaaaataaacgtggccgtccgttttcgtaaaatagagcggcttaatgccgaacggatcgcgcgctccgtatagaagctgctcttttttatcccagattaaaaaagcaaacataccgcgcagctttgaagcggcttcctgtttgtagtggcggtaagtcgcaagcaaaacttccgtatctgaatcggttttgaactcgtatcctttagaaagaagttcgtctttcagttctatatagttatagatttctccattaaaaataatccaataggagtcgtcttcataagacagaggctgtcctccattttccacatcgatgatgctgagccttctaaatccgaagcctacatgctcatcatgatagtacccatcatcgtccggaccgcggtgtacaatcatttcattcatttgtttaatcagttcttcctgtgctgctgtctcggatgatgggcgatgattgaatacccctacaaatccacacatagtattgcctccgattttttaaatttcgtgcagaaatcaaagtctgcttcttgattagacaagtgtttaaagaaaaacgtttcaagaaacttgaaaaatgttcatattaaaatatttgtatctggcaatatcacatcaatattaaatctggatatttttcaagtttcaacatccgcccgcattttgccatcgaaaaacaaagccgcttattaaagcggctatgcggttgttattctcctaatgcatctttcttcagctgatctgctttgtctgtgcgctcccaaggcagatcgagatcgaggcggccgaaatgtccgtaagctgccgtttgtttgtaaatcggacggcgaagatcgagcattttaataatgccggcaggtcttagatcaaagtttttgcgaaccacttcgatcaatgtttcttcactcgctttgcctgtaccgaatgtatcgattgaaatggacaccggctgagcgacaccgatcgcgtaggcaagctgtacttcacaggaatcagcaaggcctgcggcgacgatatttttcgctacatatctcgctgcataagctgcagatctgtcaacctttgtcgcatccttgccggaaaacgctccgcctccgtgacgggcatagccgccataggtgtcaacgatgattttgcgccctgttaaaccggcatccccctgcggtccgccgataacaaaacggcccgtaggattaatgaagtatttcgtgttttcatcgatcagctcttttggaactaccggattgatgacgtgctctttcagattgcgctggatttgttcaagcgaaatctcaggatgatgctgagtcgaaatgacgattgtatcgatgcgaatcggcttgttgttctcatcatactcaacggttacctgtgtctttccgtccggacgcagatacggcagaatttcctctttgcggacttctgtcaaacggcgagacaatttatgggcaagcgaaatcggcagcggcataagttcctttgtttcgttgcaggcaaaaccgaacattaaaccttggtctccggctccgatcgcttcaatttcagcgtcgctcattgctccttcacgcgcttcaagcgcctggtcgactcccattgcaatgtctggagactgttcatctatagacgttaagaccgcgcaagtttcggcatcaaaaccgtattttgcacgtgtgtagccaatttctttaatcgtttcgcggactgttttcggaatatcgacgtatgtggacgtcgtgatttcaccgcttaccagcaccaatccggttgtcacagatgtttcacaggcaacgcgggcattcggatctttctttaaaatttcgtctaatatactatccgaaatctggtcgcaaattttgtccggatgtccctccgtaactgactctgatgtaaataaccgacggtttttgctcatttatgtttcctcctgtatatgaagatcagccgtgatcttaagtatgatacggaactcgtccctcttgattatatgacgatactcgggcttcatacgctctcgttttgaaacaatttccattatgctattcttgacgagattctgagtcgaaattccccttagcagaatttttcctgactggttgcccggctagacctttcacgtcctgtgaaaaacgcccagtaccttcctcctgcttgatactcggctaaaacctttcacgtcctgtgaaaaacgcccagtaccttcctcctgaaggcagtttttttagcaatttttggatctcgatttatgcaataaaaaaaccttttcctattcggtgaggaaagggtctggtattgcgtgcctttcactcttatcgctcaaggtattgaacaccttgcatcaggttagcaccgtagttgtctcagaaactgtttttttccattaataagagaaaccggttgctgggtttcattgggcctgtccctccaccagctcgggataagagtatccgctcaatgaaatatcttatcttaaaatggcttgttatgtcaatatcggccgaaataaatttgaacttgtcctacgagaaaaaacccgaacgaaaaatgaagaaacggtatagactataagagtaaatgtgttatactaattctacattaatgttatacacattaaaaaacacgcaaaggaaggttttttatgaattctgtagatttaacaactgacttacaaacgctattaacgggcgaaaacgttcagatgaacttatccgttccccatttggttgaaaagatccttgagcgcaaagaaggagtcttgacatcttccggagccgtgcgggcaacaaccggtacatacaccggccgctcgccaaaagacaaattcattgtggaagaagcgagcacaaaggacaaaatcgattggggcgcagtaaaccagccgatttcagaagccgcctttgaccggctgtacgcaaaagtgctcggctatttaaaggaacgcgatgaattgtatgtatttgaagggtttgcaggagcagacgaaaaataccggcttccgattactgttgtcaacgagttcgcctggcacaacctgtttgcaagacagttgttcatcagacctgaagaacatgataaaaaacctgaagaacagccgtttacgattctttcagctccgcatttcaaagccgatccgctcgttgacggaaccagatctgaaacgtttatcatcgtgtcgtttgagaagcggacgatcttaatcggaggcaccgaatatgccggagagatgaaaaaatcgattttttctattatgaattttcttctgcctgaacaaaacattctaccgatgcactgttcggcaaacattggcgaggaaggcggaactgctctcttcttcggattgtcaggtacaggcaaaacgacgctttccgccgatccgaagcggaagctgatcggcgacgacgaacacggctggtccagcacaggcgttttcaacattgaaggaggctgctacgccaaatgcattaacttaagcgaagaaaaagaaccgcagatttacaatgcgatccgcttcggttccgttctcgaaaatgtcgtggttgacagcaaaaccggagagccggactattccgactcattctacacggaaaacacgagagcggcttacccgattgacgcgattgacaacatcgtcaagccgagcatcgcagcgcacccgcagaccatcgtatttttgaccgcagatgctttcggcgtgcttcctccgatcagcaagttaacgaaagaacaagccatgtatcatttcctgagcggatatacaagcaagctcgccggcaccgaacgcgggatcaccactcctgaagccacattctcgacctgcttcggttcaccgttcctcccgcttccggcacatgtgtacgctgaaatgctcggaagaaaaatcgatgagcacggggtcggcgtctttctcgtcaatacaggctggaccggcggcggatacggaaccggggaaagaatgagcctcgcatatacgagagcgatggttcaggccgcaatagaaggagaactggataaagccgaaatgaggactgaccgcattttcggacttcattcacctgtccacgttccgggtgtgcctgatcaagtgcttgacccggccaaaacttggacagatgaaaacgaatacgaggaaaaagcgatccacctggcgaaagcattcaaacagaatttcaaaaagttctccaatacggaaaacatcgaaaaagccggaggaccgctcgtttaactcagcctgcttgcatcagcgcagatcttctgcgctgatccagtttatcgaaaacctcttcgcctatcagcggccgatgccatttcctgggcaatgatcaagatgacagtcaagcaccgcctcagataaaacgattccaatttgcaagtattattatttgaaaatacagactttttttatttttaacaaaagaaatctttcatatgttaatattataaaaacatttgtatatttcaggaggacacatctatgaaatttggattactgccaaggatcattacggcaattgttcttggtgttatcgtcggaagctttgctccgctttggttcgtcaaaacggcagctactttcaatgatatttttggaagcttcattaaatttgtcattccttttattattatcgcttttattattcccggcatcggacaaatcggcagcggcgccggaaaaatcctcggcattacggcaggtatcgcctacacgtcaaccatttttgcaggcctcctggcgtaccttgtcggttcaaaccttcttcccgcgatcatttccggccatcagctgcaggagtttaaaaatccggaagaagtactgcaagcaggatttttcaccattgaaatgacgccgtttatgagcgtgatgagcgcactgatttttgctttcatcatggggatcggcatcgcttatctgcccggaaaaacattaaaaaacgcgtttgatgaatttcaaacgatcgttgaaaagctgatatcatatattattattccgttactgcctgttcatattttcggtattttcaccaatatgacgttcggcggtcaggtgcagacgattctatccgtatttgcgaaagttttcgtgatgattatcgtgcttcaccttgtcatactcttgattcagtactccgttgcgggtgctgcaaacggcagaaatccgctgtcgctgttgaaaatcgtagcaccggcatacttcaccgcgctcggcacacaatcgtcagcggcaacgattcccgttacgctgagacaagtcagaaaaacgggggcaagccaaaaagtggctgacttcgccgttccgctcctggccaacattcatttgtcaggaagcacaattacactgacaagctgtgcaatgggcgtgatgattctaaacggtcaaacgccgactttttcggtcatgatgccgttcattttaatgcttggcgtcacaatggtcgcagcgcccggtgcaccaggcggtgccgtcatggccgctgccggattgttgcagtcgatgctcggctttaatgaaactagcgtatcgttgatgatcgctctttaccttgcccaggacagcttgggcacagcaacgaacgtaacaggagacggcgctctcaccatgctgattcacaggctgacttccaaaaaaggaatcggaaaagaggaaaatgtgcctgcataatacagaaaagccaaggacgctatccgcgccttggctttttttaattcgtggaatttaatgatacgagcctgtatgttaaatgagtccgtccgtctgaccattcaaggcgctccgcctgcgcggtgccggtaatgtcgccccgcttggtctttctgacttcaagcggcacatgaagagggtaaacccgataaccttctttctcgagtgtaaacacattttcctcaacccgcgtttcttttccttttgtcacaatcatcgtgttaaattcaactggcattcccacctaaagtccccctccttttctcttttactttagtttaccataacttgtccaaggacggcttttcatccattgggataattctctaacaatccgcctgttttcgcgcggaggaaaatagtgggtatattggctgaaataccacgtatccacagacttgttccttcgcagaagttcacgctcaagacgccgcgcatgctcgatggagacattttcatcgtttgctccgtggatcaaaagcacgggcgcttcaatcttctccagctcgtcaaaaggcttcctccattcatacgcttcgggaaccttttcaggcgtcccgccgatgacccgcttcatcatccgccgcaaatcttttcgttcgcgataggtcatgaccatgtcgctgacaccgccccaagacacaaacgaagcggccgctgctttcatttcgattgccgttaagatgcccatgattccgccgcgggaaaagccaaaaatgtgaacgcgtccgtcctttaccagttcgtgcttctgaagaagacgaaaagcggcaaaagcatcttcccggtcattacctgcaaaatcctcatcgccttctcctccttgattgcccctgtaaaacggagcaagaacgacaaagccctgtgaagcgaactggacgattcggcccggtctgaccatcccgacgtttttaattccgccgcgcaaatacaaaaacccgtcataatttccgggagcggccggttcggccaaaagccccttaaccttgagtccttgtgaaaggtatgtgacggaaaacagacgcacctctttgttcggcgatggaaaccttcttttttctatccacattcgtcacgtcacctcttttaatccgcagctgtccctcacacctgtttagtatataacataaactattttatgccgaaaataaccgaaatcaaaggagggaaatcggtttgaagcgtttcttttttaccatattatccttcatcatgatgctgtttatcctcgcttcatgcggcggacaaaagaccgaaaagatccgtctggcggaagtgacccgttccgttttctatacgcctttatatatcgccttatctgaaggtttttttaaagaagaaggccttgatgttgaactgaaaacgacctggggcggagataaaacgatgactgcccttctgtcaaacggcgccgatattgcgcttgtcggctcggaaacgtcaatatacgtaaatgcccagggcgcaagcgatccggtgattaattttgcacagcttacccagacggacggaaccttcctcgtctccaggaacgattcggggcatttcagctgggatgatttgaaagacaaaacgttccttggccagcgcaaaggcggaatgccgcagatggcaggcgaatttgtcctcaaacagaaaggcatcgatcctaaaaaggatgtggatctgatccaaacgattgatttcgcgaatatcgcaaacagctttgcatctggtacaggtgattatgttcaattatttgaaccccaggcatccatttttgaaagagaaggcatcggccgcattgtcgcctccttcggaaaagaatcgggccgaatcccatatacaacttttatggccaaacaaagctatttaacgaaaaacaaagaagcggtcgaaaagttcacccgcgcggtttacaaagcgcaacagtgggttgagacgcactctgcaaaagaagcagccgaaagcattcaagattattttaaagataccgagctttcaatcattgcatcttcaatcgaacggtataaacaacaacagtcttttgctcttgatcctgttttggatgaaaaagaatggaaccagcttcaaaccatcatggatgaagccggcgagctgccgaagcgcacccctcatcaaaagctggtcaatacaaagatcgccgaaaaggtcacaaaaaattactaggaggtggccgcagtgtcttttctgcaagttcaggatgtcacacatacttacttttcattgaaggaaaaaacagcggcgctggaaaacgtcagcattgaagtcgaaaaaggcgaatttgtttcgtttctcggcccaagcggatgcggcaaaacaacgcttttatcgatcatcgccggcatcgtttcccccacggaaggacgcgtcttggttgaagggcgcacacctgatggaaaggatcggcacatcggttatatgctccagcaggattatttatttccctggaaaaccattgaggaaaacgtcttaatcggtttgcacatttccaaaaaactaggcccggaaacgaaggaaaccgctctcggcctgctgaaaaaattcgggctttacgaggttgaaaaaaagtatccaaaagagctctcgggcggcatgaggcaaagggcggcgcttgcccgcactctcgctgtcgaccccgatatccttctgcttgatgaacctttttcagcccttgactatcagacaaaattgaacctcgaagatttagtgttcaacacgttaaagacgtatcaaaaaacagcggtgctcgtgacccatgatatcggtgaagcgatagcgatgagcgaccggattctgctattttcaaagcagccgggcactatccataaaacatttgccgttcctgaaccgatcaggaagctgacaccgtttgaagcgaggcaggaaccggaatttcagcccctctttcagaacatatggaaggagctcaatgaccttgaacaacaaacatccgaaaccaaaagttgacttccttcatgaggcttttttaaaggagcagcaggccgaaaaaaggcgggtccgcttttttcaaatcgcgattttcatcgttttcttttcgctgtgggaaaccgcaagccgtctggcatggatcgatccgctgatcttcagctctccttcagccgtctgggcgcttttcctcgaaaaaatgggagacggatcattgccgggacatatcggtgtaaccgtatttgaaaccatcctcggctttctggccggaacattgcttggaacttttctagccgccctcttatggtggttcccgaggctctccaaaatattagatccgtatcttgtcgtcttaaatgcgatgccgaaagtggcgctgggtcccattctcatcgttgcgatcggccccagcttgacgagcattattgcaatgggcgccatcatcagcgttatcattacgactatcgtcgtctatacgtcctttcaagaaattgatgaaaactatttaaaagtgatgaaaacattcggcgctacgaaacgcgagattttcaaagaagtcattttgcccgcttccattccgacgatcatatctacactgaaggtcaatgtcggcttgagctgggtcggtgtcatcgtaggagaatttttagtatcggctcaaggcctcggctatatgatcatctacggctttcaagtctttaatttcaacctcgtcatgctgagcctcctgatcatcgccgtcttcgcaacattgatgtatcaaggtgtcgagctgttggaaagaaagtggatgaaaggcagagtataacatgaaaaaaccctgcaaatgcagggctttttatttgatgatgccggcctttttcagcttttcaagactgatcgtcaggacggaatctttcataataaaactgtaatttttgttttttgcgatatccttcgggaggctcttcagcaaaacaggaccatttgtctcatagtatgtctgctgtttttcgatcttttcgatatcggcaaaataaatatttttgacgatcactttctctctgccaagaactttatattgtccgagataggtcagctttcttacgacagcgcctgtttcttccttcacttcccgcaaagccgcttcctcagcattttcgcttggttcgactttgccgccggggaattcacggcccctgtccttatgatttgtcagcagccattgatcctcgtaacggcagatcacccatacatgctttggttcttttgaaaaaggttccttctcaaaagaaagctgaaccgtattacggtaaaaatctttaaattcgtacatcctaatccctcttatccgtttccttgcttcttccactcatcatatcatatattggttctttcggtagagtttttgtccagttcagttcagtaattttatcgttccctaaagaacttcattgtccattcctgagtgagaaggcggcaaggctggatgactccgcgcctgcgggcgcttttcaaaagcggcattttttaatctgctgaattgagttcggcaaggccgttttcactgataaatgacttggtttcttcattgcccagacggtaaagcatcgagtaaatgtctttgcgcagttcgtccattttatcatttgcactgtcattgtgatattcgaccgcaggcacgtgagctctgaaaaagttgacccagtcttctgaatacagctgatcaaaatattcccttaaaatgatgatgtcatcatctgtcgccgaaatttgaaattcccacggggaagcgtcagagctctgcgaaatcattccatcttgcaccgaaacatagtatgtctttttttccaaagccaatcatcctttttcgtgttagtatgaccagttgttttaaaatgttacggctttccccggagtttttcctttatggtatttaaaatgtccaataacatctgcggcacggggattcctaacgaatgagccgtgctcacgatttgaaacgcttcatataaaatataaaacataatagaaaaatcgcggatcgaactgcctgtttgcagcatttgatcaaaaaggtgggcaacggatatcagaaagagcgtaaccaattttttcgccagccttgtaaacagcctcttaattgtaaatcgatcttccacacattcgttcaagcttttgctgacaaattcaatgcccatcagcgtaattaagatcataaataaatattcgattcggccaaacaaaaatccgatggccgataaaccaattgtaaagagcgaaaagatgcttaagtccttaaacatatgcttcaacatcctttcaaaaaagacttttcatagcttatcctatgaaaaaagactttgaaaggcttggatgaattgtttgacaatttctaaaaaaggctttaaaaagaacgaaaacacaaaaaagctcaggcattgcccgagcttttccttaccctaagtaggctttcagcatccagttgtgtttttcgatcgattgatgaatcgcgagcagcatgtctcccgtcgtttcatcgttgacttcatcggcaagctccattccgcttttcagctcctcagccaccgttaaaaagtcattataaatattttgcaccatttgttcagcagactcgcttccgtccgcttctttaatcgcggacatttccaggcattccttcatcgttccgaccggagagccctgtatggccaataggcgttcagccaaatcatcgatatgctctgccgcttctgtgtaaagctcttcgaatttttcatgcagcgtaaagaaatctttccctttcacataccaatgataattatgtagcttcacatatagaacggtccagttcgcgacttgtttgttgacggttgctttcaatttttcagacattagatcgtcctccttttcgtttacttttgatttacccgtttagcttgtgcaggaaacatttcttttactctttatcatgattttctttgcctgatatggtaaactgttggaaaaagctattcggaggtaagtgatgatcctcttttggattattgtaggaattctgatcaccggcgccgttctggccatatcgcttgtcacaacatcaaaagcttatgacttcaagcatgaagtcgatcccctcccgtcgcgggaagaagaacagccccatcaatgatggtgggcttcttctttttcatcttcatcggtctcatccgtcgctttccctactttaatgtctgcaacaggcattgtatgctgttttttcgccgtgacatggacttggactttgtaatggccgtcttcaggaaacgctttttccatgctgtatacgccttttccctcattcttcgctttgattagctcgctatcttccttgctcccggccttccagcattcaaactccacctcatcggcatctgcaaccggctcttccccgtagaggacggtcgcttttatgacagccttttcatttttggccaccgattcaggcgtcgccagttttgccgtcagcactttgggctcctcatccgatgccgcctgcttgtccccctggctgcaggcggaaagaccgaccgctaaacataagagaatgaaccattttccaaaacgcatcctatcacccttcttctatgatatgtattacaatataaagtgtagcaaagttcagggataaatggcattattttctttgtgaacaaaaaatgaaaaccggctctcttatgagccggtttttttcaatcattttacccaaacaccttgagcaggtcttctttattttgcgaaagccaaaaacgcatcatgcgctttgcgccttcaagatcgtgaagctttgcctggccgcactgtttttcgttagccgccggaatttcagtcacttcaacggcttctttgaacgtatcctcaagcaaatcaacgatttcttccactttcggctcaccgcttaccaccaggtaatagcccgtttggcagcccatcggcgaaatgtcgataatatcaaagtggtcatatttttccgcatatgtgcggattgtaaatgcaagaaggtgctccaaagtatgaatcgtatcaggtttcattgcctgtttattcggctggcaaaaacggatgtcaaacttgttgacgacgccgtccgttcccactttgtggacgccgcagtgtctgacataaggcgcttttaccgcattatggtcaagctcaaaactttcaactgaaggcatggttcctctctcccctctaatcggtctttttgtattatatcatactttaccgataagttttcaggtgaatgcttttcctttttatgcgttttttgcttatattataataagatcaaaacaaaaaaggtgcgaaaaacatgaaaaccgtattcctgctgctcatccgcttttatcaaaaatggatatcaccggctcttccgccgacctgccgtttttatccgacatgctccaattacggtcttgaagcgatcgaaaagcacggcgcatttaaaggcggatggctcaccatcaagcggattctaaaatgccatccgtttcatcccggcggaatagatcccgttccggaaaaaaagcaaaaggattagcgctcttccggatatccgttgacaatgagatccagtctgcctgtttccggatcaatgacaagtccgtgaacaggtacttcctccggcatcagcggatggttccgaataacgcttacactgtccctgacgctgtcctctacagaatcaaagcttttcagccattgttcaaaatcgacgccggagtactcaagcgtttcaatccgttcttttggaatgccgcgcttgacgactttgtccaaaaagctgtcgcagctcagcttgctcatgccgcagtcataatggccgatcacgcatacttcatcagcgttcagttcgtataccgcaacgagaatgctccgcataatacttccgaaaggatgagccacgagtgcgcccgcgctcttaacgatcttcacgtctccgttccgcatattcatggcatgaggaagcagctcgacaagccttgtgtccatgcaagacagaatcaccattcttttatcgggaaacttgcttgtttgatatttttgatagtcctgccgttcaacaaactgttgattgaactgtagaatattatccaaaagtttcatggctcatttcctttctaaacgctttttatatctaaatataacatatttcttgtatttttttcacaagtccagtaagatttcctttgtgcaaatcgaaacaattacgttttaaggaaggtgaaaaacatgaaggaaaacctgattccggtcactgttttaagcggttatctagggtccgggaaaacgacgctgctgcagcatgtcctgcatgaagcgcacggcttgaaaatcgccgtgatcgtcaatgatatgagcgagattaatatcgacggctccctcgtgaaaaaaggtgacctcatccgcacggatgaaaagcttgtcgaaatgcagaacggctgcatttgctgtacgctgagagacgatctgctcatcgaagtcaaaaagctggcggagaacggcggaatcgattatattctcattgaatcttccggtatcagcgagccgattcccgtcgcccaaacctttacgtacaaagatgaggagctgaatattgatttaggcaaatattgcaggcttgatacaatggtcaccgtcgtcgacggcagccgtttttttgaggacttcgcttcgggcgagagcctattggaacggaagcaggcggcagatgaaacggacagccgggaagtggccgaccttttaattgagcaaattgaatttgccgatgtcatcattttgaataaaactgatttactcaatgaagaagagcaggaaaagctgttctggtccctgagaaaactgaatccggactgcagaatcatttctgcggcattcgcaaaagtgccgctttcggccatcatgaatacgaaatcgttcgattatgaaaaagcaagtcaatcagcgggatggatcaaagagctgaatgaagagcacacacctgaaacagaggaattcggaatctcttctttcgtctatcaaaagcaaaggcctttccatcctgaaagactgaagcgctggcttgaaaactggccgccgcaaattatcagagcaaaaggcttcttctggcttgcttctcgaaatgacacagcaggccttctgtcccaggcaggctcttccctgatgatccaaagcgcgggcccctggattgcagcgtctaccgaggaagaacaaaagctcgcgtttgaagaggaccctaatttgaaagcggactgggatgaaacatacggagaccggaaaacggaaatcgtttttatcggcattgacatgaatcaggaagacattatccgctccctggatcagacccttcttacagataaagaaatgaattcagactggtcggccttacttgattcactgcctgagtatatttaactatcatttcctcttttcaaatcgtaattattacgatacaatgatacaggaccattaaatcggaaccatttcagttttacattgagaggagaaataccatgaaaaaaacattcggaatagcatctgcattcattcttgctgccggattaacagcgggttgctcaagcaatggagcttccagtgaacaaaaagaaaataaagacacgctggacatctatacaaccatttatccgcttgaagacttcaccaaaaagatcggcggagaatatgtgaacgttaaaagtgtttacccgccaaacgttgaagcgcacacttacgagccaagctcaaaaacgatggcggaaatttccgactcggatgcctttatatactctggagtcggtgttgaaggattcgcagacaaagctgtaagcacacttaaaaacagcgacgtcaaaatcgtcaaagccggggagggcattgaccttctgtcacgtgaagaagaaggcgaacatgatgagcatgcacatggagaagaacacggtgagcacgatgagcatgcacatgaagaagaacatgaacacggagaagccgaaggccacgatcatcatcacgaccatggagatcatgacccgcacgcatggcttgatcctgtccttgctgaaaaaatggccgaaaacattaaagaccaactcgtaaaattagaacctgaacacgaaaaaacgtttacgaaaaactatgagtcattaaaaaaagacttggagcagcttgacaaagacttcaaacaaacagtcgacaaagctgataaaaaagaaattctcgtctcacatgccgcctacggctactgggaaaaacgctacggcattaagcagataagcgttctcggcctttcgcctactgaggaaccttcacaaaagcagcttgaaaacattgttaaaacagcgaaagaacataatattaaatatatcatttttgaaagcaatgtcagcagcaaaatctccgagatcatcaaaaaagaaatcggagcggaaagtctgacgatgaaaaaccttgaatctgtaacaaaagaagacattgaaagcggcaaagattataccgccatcatgaaagaaaacctggacgtcttgaaaaaagctttatcaagcaaataacagagaacaagcgcatgagatgtcatgcgcttgttttttaaatggacgaaaaaaaaggccggaaacatccggtctttttaatttattaatccatattaaatcttttcttgaactgttcgacccttccgcctctttcattgaatttctgtcttccggtataaaacggatgggtatcagagctcacctcaacttttataacgggatacgtcttgccgtcttcccactcggccgtctcatcggaagttttagttgagcggcttaaaaaacggtacccgctgtttacatcctgaaagatcacttgataagttttcggatgaatatttggtttcatatgccattcctcctatcaaaacgtaataattacgttttattatatacctttcaaatccctgtgtcaaaaatgaatgttcatttgccatacttaatccctttatccattttaacctcctacaggaagaataatctaaaaaaggcggtaaacaataaaaagcaaaatggtgtaaatgaaaggtggttttccggatgaatgacttgatttttgcaagaagccttttcggaacaacgatgggattccatattatttttgcctcgctcggtgtcggaattcctttgatgattttgctggccgagctgatctatcaaagaacgaaagatccccactacgccattatggccaaaagatggacgaaggcgcaggccgtgttgctcggggtcgccataccgaccggaaccattgccggcacgcagctagccctgctctggccgggattcatggaagtgatcggaaaagtcatgtcccttccatttcaaattgaaatctacgccttttttattgaggctttatttatgtccatttatgtttacgcagccgatcggctgactccacttatgagaattacagccgtcatttttatcgttatcggagcagccgcatcggccatcttgattacaaatgtgcacgcttttcagggaacgccagaaggcttcaaaattgtaaacggtgaaattacggatgttcagccgtggacggcgttcttcaacaaaagctttgtggccacagcaggacatgttgtcgtctccgcttttatgacaggtgcgtttattattgcgacgatagccgcctacaaaatgctccgaaaccgcggcgatgatagagtctacgcccttcataggaaagcgctgctgctcgggctgattgtcggaggagcgttttctctggtcacggctctgagcgggcacgaatccgcacagctacttcaccgctaccagcctgaaaaactggcgggcgcagaagggctgtttgaaacccagtcccatgctcctcttgcgatcggcggatttactgatgaaaagacgcaatcggtgaaatgggcgattgagattccgtgggctttaagctttttggccgacaaccgctttgacaccgtcgtaaaagggctgaatgactttccaagggatgagtggcctcccctgttcattcataccttatttaacggcatggtttttatcggcagccttttgattgtttatgccgctgtgggttttatttggagaaaagtcatgaaaaaagaccgctttccccgctggatgctggccgtgttcataaccggcggcccgctcgcattgctcgcaatcgaacttggctgggtattcgcttgcaccggaaggcagccttgggtcatttaccatatgcagaaaacgtcggaagtagtgaccacctccggctcgatcggcatattgtttcttttgttctttatcgtctatatcattttaggagcagcggtggtgttcgtattgcaatattactttaaacgccatcctgtcgaagaggacttaaaaagcagctgaatgcacaaaaaaaacagaagggaagtcatatgatgcaactggatggaacaacagatgccctgctggctatttcgatcgtctggggatttatatttatatacgccgttatggcgtcgatggattttggagcgggattttggtcgatgatttatatgaacaaaaaacagctgaaagcaaccaatattgcaaaccgctatctttctccgacctgggaagtaaccaatgttttcatcgtcggaatcgtcgtagcccttttcagctttttcccgggcggcacttttgtgctggggactgtgcttttgattcccggcagcatcattttattgcttttggcgattcgaagcggatttttggtcttctcccacgctgcaaaagattatgaaagggcgctgacttacgtttcagggatcagcggctttatcattccggctgttttaatccttgtcttgcctgtgacacacggcaatttcgtataccaggtagacggaagccaccaattggactttgtcaatttgtttttaagccctcatgcctattcttttatgggcttcgccattttcagtacgctgtttctgtcttcactgctgctggctgatttttcaaatgtagccggagaaaaagacgcgtatcaggtctaccgccgaaacgctttaattaccgggccgctcgcactgctcatgtcgttcagcatcatgatgaccatgaggacggaagccagctggctttatacaaaaatgatggacgggcttccatggctgattttatcgtttttgctgtttctcgtcgcatttgcggctctgtttctgccaaacagacataacagcgaccggctgggaaagccgcgcctggctgtcatcgccattacgctgcagtattttacggcgagctatgtgtacgggagggcgcaccttccttacatggtctatcctgatgtcacgattcaatcgggcttcaccgcaccggagacattcagggcgctgttcatctcctacatcgtcggttttattattttattccccggcttttattatttctggaaattgttcatgaaggacaagcggtacatcaaacagcatgaataaggttaagctaaatgtgtacaacttttaaagggggcccaaactaaatggagcaaaaaatactgtgtgaagtcagcaactgcacctattgggaagagggtaacaaatgcacagccgacgccatctatgtcgtcagccatgctgaaggtgaaaaagcttctaatagtgaagaaacggattgcaaaacctttaaacctgaacatcattaaaacggatgaatgaaggagggacagtcgtgaataaagagtcgctgttacaggctttttatcaggaaatccacggggcggatgaaaccgcatttcaaaaagccgcccgctccttcatgaacttatgggattatgaatacggctgtctcgacgggctgccggatcaagcggaccgggtgatcggacagatcgtgcacgaagatttgcttttgggcgattaaaggaaagggctgtcataaaggcagctctttttatgttaaaaaaaccggctagaaagccggtccaaacgagaagggaataatgtacagctttaatatacatgagaggccgcctatttaacaaagcttgaaaatctggaaatcggcgtttaaaacagcctttactgcttaaaaacgtctattttagatgaattctttcttaaaatatgagtatcgacttcaaatcccattcccggtaaggttggaacctgaatatagccgccctcgatccggatttccggttttacgatatcctcttcccaataccttgaggatgaagaaagatccccgggaatcaaaaactgcggaagagaactcagtgcaagattatgggctcttgaaatgccggtttcaaacatgccgccgcaccagacaggcatttgatgttctttgcagatgtcgtggattttcagagcttctgtcaaaccgccgactcgggacggctttatattgataattttgcagctgccgagctcaattgcctttcgcgcatcagcagccgaacggatgctttcgtcaagacaaattgatgttttgatatgtttttgcagatggcggtggtcaacgatatcatcatcagccagcggctgttcgatcatcattaatttaaatgcgtcaagctctttaatccggctgatgtcttttaattcataagaagagttggcatctgccatcagcggcaccttcggaaaatgccggcgtatttcttttaaaagctctatatcctgcccgggctgaattttgatttttattctttgatatccttcttttacatattgttcaatttcctgaagcatatcatccaatggggcaagaccgacgacgactccggcaggaacttctgtttttactccgcccagcgcctctcttaaagagatcccttttttcctggcgtaaatgtcccaaaaggcggcttcaaggccggcctttgccattcggttgcctttgaatccgcgaagcgcctcgggcacttcggaagggtgtgtgaatgattcgcgcagcacagccggaatcaaaaaatctttgagcatgtggtagcatgtctccgttgtttcttcggtgtaccacggagatgaaaaagcggatacttccccccagcctgtcacaccttcttgatcagcagcttcaacgatgataaacttgcgatcctgaaaggtttccaagcttgatttaaaaggctttttcagccgcatgctgagatggtacaatgtcagctgtttgatttgaatcatggcgctctccctctacaatttatgtctcatcagtttatttgaagcatttctcggcagcctatcgacaaaatgaaatgctttaggcactttatatgaagcaagccgttctttgcaaaattcgctcagctcctcttcatcaacggggctgtcggcgacgagataggcgtggggaacctttccccaagttttgtcatcgactcctttcacccccgcttccgcgacattggggtgtgacagaagaacggcctcgacttcagccggatagatgttttctcctcctgatatgattaagtctgaacgcctgtccagcacatataaaaatccgtcatcgtcaaaatacccgatatcaccggttttaaaccagccgtcattgaatgagtctttatttgccgcctcatttttcaagtagcccttcataacggtcggcccttttacggttatttcaccatgttctccgggttggcattccgttccgttcttttcgattttgatgcttgatgcaaacagcggtttgccggctgaaccgagcttttcaatcgagtattccggggcgagggtcgcaatctgtgagcacgtttcagtcattccgtacgactgtacgacgggcagccgctttcttttgcattcctcaaggagagaaagcggtgctggccctccgcccaataacaggcaccttaatgatccggggcatctgtcgacttttgccgcaagcctcgacagcatcgtctgaacgaccgatgcaatcgttacttgctggtctttgatcgaacgaagaacttcttccgcgtcaaacctttgatgcaaaacgacagtcattccgtaaatgaccgatttaaaaagcgccgataagccgctgatatggaaaagcggcaaggcgatcagccagcggtcgtgttcttggagccccaaattcaaggcggatgaaaccgcgctgaaataatggtttgcaaatgtctgcataacccctttcggccgtccggtcgttccagacgtatacatgattgttgccgcatcgtccaaatgaatgctttcgatttctgtaaccggcgggcaagcggcgttttgaacgtcttcaatgtcaacagcgcgagccggctgtccccctctatgctcttctatgaaaggcttctctgtaagcaatagctttgcttcagaatgttcaatttgatatgatcgttcggccattgacagcttcgtattcagcaaaacgatgcgaacgccgagaagaaagcaggcatggacggcgatgaccatctccatccggtttgtgagaagtaaagccgctgtatccccattcttcagaccaaagctcttcagccggccggccgttttttttgcttcatgaaataattgaataaaagtcagcttgtgatctccctgaatcacagccatcctgtcaggtgtcagttctgctcgctgtttaagccaattcggatggtccatcagcatatcatcatctccaaaaaatgtcttgaatgataaaagaaacagctcagtcgcaccaagctgtttctctcttccgatttttaaggaaaacgcgggaactgtccgaagtctggacggcgtttttctttaaacgcatcgcggccttctttcgcttcatctgttgtgtaataaagcagtgtcgcatctccggcaaactgctggatgccggcaagcccgtccgtatcggcgttaaaggccgctttaaggaatctgagtgctgtcgggcttttctcaagcatttcttcacaccatttaatcgtttcttcttcaagcttttcaagcggtacaaccgtattgacaaggcccatttcttttgcttcctgagcgttgtactgacggcacagataccagatttcgcgcgcttttttatgtccgacgatacgcgccagatagcctgatccgtagcccgcatcaaagctgccgactttcggccctgtttgtccgaaaatcgcgttgtccgcagcaatcgtcaaatcgcatacgacgtggagcacatggccgccgccgatcgcatagcctgacaccatcgctacaacaggcttcggaatgacgcggatcagccgctgaagatcaagcacattcaaacgcggaatctcgtcttcaccgacatagcctccgtgtccccttactttctggtctcctcctgaacagaacgctttatccccggcacctgcaaggataatgacaccgatattggcatcatcccgcgcatatgcaaacgcatcgatcagttctgaaaccgtttttggacgaaatgcgttatgtacctcagggcgattgatcgtgattttggcgatgccgttatatgtttcatataatacatcttcgtattgacgttcgcttttccattctacagtcattgatgtgtacctcctactttaaaataaactcacttactattctaccaaaaaaatcgggctcttccacatgaaccgcatgaccggtatgttcaacaatctcgaggcgggcggctggaatccgctttgccatgctttcattgatggcgacaaatttctgatccaggcttcccgcgatgagaagcaccggataattgatcccgctcagtttgttccaccaagacggctgtgatccggtccccattccgattaagctgcctcgaaggccgatcggattgttgttcagacgttcttcgcgcactttttttctttttgaagggtccattgaaagctgggatgcaaacagcggaatgccttcccaataatctacgaaagacttgattccttcttcaagtatccgcctgctgagccggctgtcctgctccctgcgcgcttttctttcttcaggcgaatcaagccccggagaactgctctccagcacaagaccggacacacgctcggggtgaatcatcgccaaggataaggcaagccggccgcccattgaataaccgatgaggtaagcctgttttacatttaaacgatcaaaaatttcgatgagatccgctgcctgcttctctgttgtgtagcgccggctgtccgatggcgagtcggttccgccgtgtccgagcagattcagcttgatcagacgcatcccctgaaaatagccgtctatcccgtcccatgtggccgcgcttcctgtaaagccatgcaaaaacaccgccgttttttctgcagacaggccattgtcttcaattttataggaaacgccgtctttcagtgtcaatttcaaaacggccactcttttcttatttcatgcagcgcggaatcaagcatccggcgatgctgctccacacgatcatcgcgcttcgttttcacctcaatgatatccaagccgcggcggttgacggaggataaatacgcatcggcaaaatgtgcggatgattcagggcatatatagcgtcccccatacagcttggcagcatgctcgaattcgagacccgtcggcgttccgaacaagagctcgaagtacctttcttcagcagattggggaagaaatgagaaaatgccgccgccatcattgttgacgagaacgacagtcagcggaatatcgagcgttttgctgacgaggaggccgtttaagtcgtgataaaatgacagatcgccgatgacaagggttaccggttctttcgttgcggcatatatgcccagcgccgttgagacaacaccgtctatcccgttcgcccctctattggcaaaaatccggaaggtccgttcctgattttcaaaaaatgtgtccgcatcgcggatcggcatgctgtttccgacaaacacggagctgttgtccggaatcaaatgctgaaggttccggtagatatttccttcaaaggtaagatcctcagcttcaagatttcttaaaagagcgcggaagcggctgttggcaaaccgccacttctcaagccagttgcctgtcctattttctgaattgacagcggaatccgcaagaacagcaatctcctcttccgtgcaatgcagcatatgtgcgctgagctgagtcggatcgcgccatcctccatctggatcaacgacgatttgcctaatgctcggattttgcttcagcagctgaaaaagcggcttggaaaccggcatcgcaccgaagcggatgacaagctcaggcatgagctcgcgtttcagctgttcttctttcaataatgagtcgtatgcatcgataatggtttcttttgaatgggtgccgtttctcaagtttgagagcgggtcagccaaaattgggtattctgctgcctgtgaaagagctacaatatgttcttttgcatcatcatcttgcagctctccgcagacgattacgcctttttcggtctctttaatcagagcactcagcgctacaagctcatgccgatcagcacggaagcggccgctttcaaccgtcacatgactgccgcttctcagcctttgaaaaggttcatcctcaaggttcggcatgagcggctctctcagcggaaagttgatatgcacgggcccgcgcggcgcttttttggcttctccggctgcacgtgctgccaaagaccggatgtacgccagcatgtcaggatgactgtcaggcaaagccgagtctgtgaaaaacttaacaaagtttccgaataagaattgctgatcaatcgcctgaggtgctcctacttctctcagttcatgcggccgatcagccgttaagatcataagcggtattctagaataatgagcctcgatcacagccgggtagaaattcgctgcagccgtcccggatgtacagatcaatgcgactggcttccgcattgcctttgccatgcccattgcaaaaaaagcagcggatctttcatccacatggatatgaacattgatgtccggatgactcgcggccaaaatcgcaaggggcgtcgatcttgatcccgggcagatgaccgcttctgtcacgcctgcaagggaaagctcatcaataaaattccctatatattttgtaatcggattttcagtcaacggatatcgcctccaagagcagacagcatcggcttcatcttaatttgtgtttcttcgtattccataagaggatcggaatcagccacaaccccgcagccggcgaaaattctggccgcatttgaatcgataagtcccgacctgatcgccaccgcgaattccccattgccggacatgtcgatccagcccgccggtgccgcataccagccccttgacatcggttccaactccctgataacctcaatcgctttttgctgtggtgctcctccgagcgcaggagttgggtgaagcttctcgattaaatcaaaaatcgaggactccgcattcattttgccgacaatcggcgtatacaaatgctgcacattttttgttttgtaaagtcccggcttggccggctttttgatattgctgcaatttgacaaaagcgcctgatgaatcatattgacgacaatgtcatgttcgattagatttttttcatcgtttaacagctcaagaccgagcatccggtcttcctgctcactttcgcctctcttgattgaaccggcgaggcaggtcgacagaacgttctctccgtcttttttgacaagacgttccggagacgcgcccacaaaacttttgccgttttcttcaatggcgaatatatagctcgttttttgttcagacatcagattgaataatactctgtgaagttcgacaggctgatcgaacgttaaaaggatctctctggcgagcacgactttatcgtacttcccgtttttaatgtcgtctgtcgccctccggaccgcttcaagccattcaggaacatcaagctcttccttggcggtatattgcgtatgacctttttccggataacgggaatcgtccgccttggtcagctgtgaagcagcgccctttatttcttcaagtactttgcgcacgtcttcttcaggagtcttccatctattgaccgttatgaatgtttcctctccgtcctgtgtcagcatagcggcgggaataaaaaaagcgccttcctggtagccgttccaatgctgcttgcgatcttccagcggatcaaatgaaaaaccgccaaacagcaatggccccaccgctgcctgacctctgctttgatcttcatgaaagtgataggttttctcttttaagcgctcccatttttcatgtacagcctgataacgtccggcatccttcagatctgtggaaaccgatatttcctttcccagcccgacaagcgtcagcccgccgtccggatcagaccagaagaaccgttccccggcaaattgttctttcccgtttatgaaaaaggaaagagcatctatgctctcaatttttctggaatagcttattaaaacagcatggttgacttttttgacgatgtttaatgcttcaggcgcttccttgaggaaagtgcgctgcactgttgtcaccatgatacattcctccaaaatccgtaaaatgcttttataaccatacacctgtgaacggtatgtgtcaacaaaacgacactttattaacaactgccaccacctattataaacgtaatcggccgattgaaaaagacaaggtcatttattattttcgaattgcaggacggccgctttttttctaacaatatcacccattatattgacaccttttttaactttttctaaacttagtatggacgtgtacgtattaaaactaaaggagtcatactttatgcagcatcaatcactttcagggagtgtttctgaaataaagccggaaaaatggcgcgtatggtggatgttaacaagaccccatacactgacagccgcctttgtccctgtaacgctcgggaccgtgatgtcccttgaatcggggaaaattgacatctggctgtttttagctatgctggccgcatcaatattgattcaaatcggaacgaacttattcaatgagtattttgattttgtaagaggacttgataatgaaaactcggtcggcatcggaggcgctatcgtccgctatggaatgaaaccgaagacggttttatacctggcatacggactgtttggagcagccgttttactcggcgtgtacatctgcgcttcttcaagctggtggcttgcgctgatcggattggtttgcatggccgtcggctatctttatacgggcgggccgtttccgatctcctatacgccgtttggtgaaattatgtcaggcgtttttatgggaatggtcatcatcctgatttcatactatattcaaaccggcgggctgacttggaacgtctttctgatctcccttccgattacgattttagtcggaggcatcaatctttccaacaatatccgcgatttggtcggagataaagaaaacggaaggaagacgcttccgattttggccggaagaaaaaacgccgtgcagattttaagctgggtttttgctgtttcctatatattgatcggtatatacatcggctttgagatcgtttctctgtggagctgcctcgttcttttaagcctgcctaaaccgattaaagccatccaggagttcaaggcaaaagaaaagccggcagaactgatggtcgccatgaaatcgactgcgcagacgaacacctttttcggccttctgctcgccatcgccctgcttattcagtacgttttttaaaaaaagagcctatacggctcttttttttgcttttatttacaatgaaagttctgtttgaattcgttcatactaaaaacgcgagcactttaaagaaacgaggcgatgcatgtgctaacaaaagaacagttgacaaaactcgaaaatgaactgaaagccggaaaagaacagatcatcagccgctttaaagaaaacggacattttggcatcgatgcgacgcacccgttcaactcgacgggcgatctttcggcttatgacaatcatccaggagatgaaggtacagaactgtacgaacgcgaaaaagaccttgccctttttgaacatgaaagagagcatttacacgatatcgaacatgctttagccatgatcgaaaaaggaacatacggccgctgtgaagtatgcggaaaggacatcccgtatgaaaggctgtccgtacttccaaccgcaacgacgtgcagtgaacattcgtcaaccgtctccgtttcaaaagatcggccgattgaggaagaagtgctgaacccgccgtttggacattttgaacaagacgaggacgatgaaaatgtcgcatacgattcagaggacgcttaccaggatgtcgaacgctacggcaattcggaaacgcctcaagatctggccgttccgcctctgtcatacagccagatgtacatggagtatgaagagccgctcggatatgtggaagattacgaaaactatgccgcaacagacattaccggaaaagatgttaccgtctatccgacgaaagaacacgaaaaatatgaagacctgcttgatgaagaaggcatcatgacctctttcggcgatctcccggcttatgaaaaggatccttatactgaagacgacgactaagcccctgaccagcggggcttagtgtttttaaattcaatgctggtacggcttaatttcccaaatgtcgtccgcatactcccggatggtgcggtcgcttgaaaaatatccggcatgcgcgatgtttgtgacggctttttcagcccaaagacgcttattcaagtagtctttttgaatccgctcctgcgctacaatataagaagcaaaatcttttaaaacaaagtattcatcattataagcgatcagcgagtcataaatcggctcaaattcgccggcttctccttcgaaaaaaccattgatcagctgatcggccgtttgtctgatccttgcatcatgctgatagtattcccttgacagatagccgcctttttccgcgtagtccagcacttcatccgcctttaaaccgaacgtgtagatacactctgtccccaccctctcaagcatttcaatattggcgccgtcatgcgtgccgatcgtcaaagccccattaatcatgaacttcatgttccctgttccggaggcttctttgctggccgcagatatttgctcgctgacatctgacgccggaaaaatacgctcggcggttgatacccggtaattttccagaaagatcacattgatcgaatgtctgacatccggatcatgattgattttatctgcgactgaatggatcagcttgatgacctttttggcataatgataagtcggcgatgccttcgctccgaaaataaaggtttgcggataaatggcaaagcctttgtcttccttcagcctgttgtacaaatacatgatatggagcacatttaaaagctggcgcttataagcgtggagacgcttgacttgaacatcgaagatgctgtcagggttgacggcgaagccgacgctgcctttcatcatgtctgccaaaagctgctttcgttcccttttaatgcgctgaaacgactcgagaaacacggaatcgttcgcaaatggacgaagatccagaaggctttccggatctttcagccacctgtctcctatcgcttcagtaatcaagttcgcaagcggcggatttgcctttaacagccaccttctatgtgagatgccgttcgttttattattgaatttaaaagggaaaacggaataaaagtcgttcatttccctctcttttaatatggtcgaatgaatgttggcgacaccgttaacactgtagctgccgacaatcgccaagtgggccattttcacttcgccgtgggcgatgacggcaagcttttcgatcctttcccattcacccgggtatttttcccacagccagccgcaaaaccgctcattgatctcctcaatgatcatataaattctcggcagaagcggtttaattaaatcgatcctccatttttccagcgcttcggcaagcgtcgtatgattcgtatatgagatcgtatgtacggtaacatgccacgcttcatcccacgtcattttttcttcgtcaagcaaaattctcatcaattccggcaccgccaaagcgggatgggtgtcattgatatggatcgcgactttttggtgaaaatcatgcagtgacgggtgagtgttcttatagcgtttcacaatgctttgcaggcttgccgatactaaaaaatactgctgcttcaaacggagaatcttgccttcgtcatgcgtgtcatccggatacaggcattcagatacagcttctgtctcgcgcttatacttcaaaatattcggttcatgatggagcgagcaaggctccgcattccacagccgaagggtgttgaccgtcttggtctcatagccgatgattgggatgtcgtgaggcacggctgtcatcacttccgcatcttcctgccaaaagcggaggcgccctccttcctgcgccatcttgacccgcccgccgaaacgaacacaaacagcctgatcggcgttgcggatctcccatacgtaaccatgtttgagccattgttcaggcaattcgacttgatgaccgtcgacgattttttgttcgaaaaacccatgcttgtagcgaatccccattccatgcccgggaaggtcgagcgaagccagtgaatccaaaaagcacgccgcgagcctgcccaatcccccgttgccaaggcctgcatccatttcggcctcttcgatgtcttcaagacaaatgccaagctcggtaagaccttctttgacaatctcacgaaccccgagattgaggaggttttggccgagcagtctgcccaggagaaactcaatcgataagtaataggtctgtttattttggttggagcggctcctttcattggtctcgatccagtttgcgctgatatgttccctgaccatgatgccgagcgtctgatactggtcaagcgttgaagagtcccgaaagctttttccgcacaaccgttcaacacgtttcaaaaagcattgtttaaagctttctttacttgagaacatgcgcttccccctttatctcccggctgtataaccgctgatactgacgggctgacaaagcccagctgacatcatgtgtcatcgctttttgaacgatcctgccccactcttctttcctgtgataaaatgacagtgctcttttgatcgtatgcttcatatcatgggcgttaaaatgggcgaacgtaaaaccgttgccttcaccggttgtttcccggtaagcggtcaccgtatcatgaagcccgcctgtttccctgacaaccggcaccgcgccgtacctgagggcaatcagctgtccaagaccgcacggctcgaattttgaaggcatcaggaaaagatcgctcgcggcataaatcttgcggctgagcggttcattaaaaccgatatacgccttgcacctgtccggaaaagcatgctccatatagcggaagtaattttcaaattccgcttctccggttcctaaaacgatcagctgcatgtcttcctcttcaaacagttcatgcaatacccgcttgatcaaatcgaagcctttttgcttcgtcagccttgccaccatgctgatgagcggaatgtcttcattcaccggcagaccgaatgtcttctggatcacggctttatttttccgttttccgtcccggttgacggcatcgtaatgataatcgatgtgcggatcgtttaaagggtcgtacagcacatcgtcaatcccgtttaaaatgcctgtcagtgcatccttcttgtctgacagcaccccttcaagccgctcgccgtagtatggagtcaagatttcatcgcggtacgtcggactgaccgttgtcacctgatcagcggcgataatgccgcctttcatataattaatgttcccataaaactcgagcttttcggtcgtgaaatgggaaatatcaagtccgagcaggtcatgaaccgcttccttcgggaaaatgccctgaaattgaaggttatgaattgtaaatacgcttttcatgtgctgatagaacggcttttttcgatattcttcttttaataaataattgaccatccctgtgtgccaatcgtgggtatggatgacatcagcttcaaaattcagcgcgtatagtgcttccaaaacagcccgcgagaaaaaagcaaaccgctctccatcatcataatggccgtaaagggaatcccgattaaaataatacccatgatcaagaaaataataggaaactccgtcatgttcaaggtgttcaatgccgcaaaactgcctgcgccacccgacgcgaacctcgcattcagccgttttaaccatccgtcttctgacgtcttccgcaatcaaactgtatttcggcatcatgacgaccgtttctatgcctaaaagggcgagctctttcgggagcgccccggcgacatcggcgagcccgcctgatttaacaaacggcacacattcagaaacagcaaataagactttcaagagttcatcagcgctccttgtatggctcctttttttaatatgaaagggaggctcatggtgccggacatttcgatatgatggccgattttgacgtctttgtcgcagatgacgtgctcaagccggcagttttctccgatccttgttttttgcatgacaacgctgtttttgatggttgttccttttcctacgtgaacccctctgaacaagaccgaattctcaacctcaccttcgattacgcacccattagcgataatcgattgctttaccctgctgtttttagcgtattttacaggaggatcgttttttatttttgtgtagacaggctggcccatatgaaagacttgctcccaaaacacaggctgaataaggttcaaactatgaaaaaggtagctttcgggggaatcgatcacggctgtatatcccgagtgctcatagctgttgacggatagagagccgcgctctttccggcagacttcttcaaaagattgggctccttcagggcaatgcccttcaaccatctcccacaacagactcttcttagtgacatacattcctaaaggctttccttcgtgacaaatttcagtcagatcacacccggattcaaggtgttgtttgagcacttcttgaaaaggaatgtgaccgaccgtatagctatttgccacaacagcatattgttgagtgcttctttgaaaataatcgagatgctccgcaaattgccgaaacgatccaagcccaacatgctcatcatggggaagtgaagatggaagaaagaaaaggccctcccttttcctgtttaaatcccactcttttcccgatcctaaatggtccatcaaggagcggtacggggacttggagaatacagcgacactccgaatgcctgcatgaaccatgcctgacaacgcaaaatcgatcagccggtaccttcctgcaaacggaacggctccggtcgagcggccggccgttaagtcctgaagagagtgctggtttacagctgcatcaataattcccaacatttgattattcattgataccatccgcctctccgcgttgtttaaacaaccttatgttttttgacatactcctctgtgatcagcaggacttcgccatcttccggcttcgcgcaaaaaccgtccggaattcgaattcctgccgatacaatggcattttcgatctcaacatactctccaattgaaacgtcatgcatcacgactgaacgtttgatggcggaatgtctgccgatggcaacgcgctgaaatataaccgaacgggtgaccgacccatacacggtgcatccttcgctgacgagcgattctttgatttccgccagatcggcaacaaactgcggcgggagattcggggagactgaataaatccgccagttccgttcgaacaggtcaagcggaggatgatctccaagcagatccatattggcttcccataaacttctgaccgtaccgacatccttccagtatcctttaaacggataagcgttcagcctcttattttcttcgagaagagccggaatgacatcttttccgaaatcgtggcttgacgcggaatttttttcatcgcgttccaacgcatcttcaagcacgctccatttaaaaacgtagacacccattgatgccaaattgctctttggatatttcggcttttcctcgaagcttgtaatctccatcttgtcattcgtatgaaggatgccgaaacggccggcttctgcccagctgacttcaatgactgcgatggtggcgtcagcttgtttctccgcgtggtattcgagcatttttccgtagtccattttgtagatatgatctcctgataggatgagtacatgttcaggctgaagctcctttaaaaaatggcggttttcataaatcgcgctagccgtccctttgtaccacttcacttccgacgcttcagcataaggggataaaatggagacccctccgtcattgcggtcaagatcccatggctcgccgattccgatatatgagtttaataaaagaggctggtattgagtcagcacaccgacatgatgaattcccgagttggcgcagttgctgagggcaaaatcgatgattctgtactttccgccaaatggaacggcgggttttgcgaggtttttcgttaaggcattcagcctgcttcccttgccgcctgccaaaagcatagccacacattgttctttcatccctttttcgctcctctctttttgactgctctgaaaaccgcagctcccagcggagggactgtcatgctgatgctgtatggtttgccgtgcagaacgccttttcttgcctgaaggcgttttgggttgatttggtgtgaacctccgtattttgcatcatcgctgttaagcacttcgatatattcggtttgaaaagggacgccgacccgatattcgtgatagacggaaggtgtgaaattgcagacgataatcagcgcttcaccgggctgttttccatagcggataaacgatacaatcgactgttccgcattgttaacgtcaatccactcgaatccttgctgccgatgatcattttcatacaggatacggctttttttgtagaggtgtagagcctcctttgtaaacattcgggctttgcggtgcatgtcaaaatcgtccaaaaaccaatcgagctcttcttcgtctttccattcatcaaattgagcaaactcaccgcccataaaaagaagcttttttcccgggtgcatcataaaataactgatcagcaggcggtactgggcgaatttctgccaataatcgccgggcatcttatgaagcagagactttttgccgtacaccacttcatcgtgggagaacggcaggatgtaattttctgagtaggcatacattaaggagaatgaaacaagatgatgcaggtgttttctttgttctggggaagcttccatataggttaatacatcgttcatccaacccatattccacttataattaaacccgagaccgccttcataggtcggatgcgtcacaagcggccagtctgtggagtcctctgcaatcatcaaaaagtggggatcttttgcaaaaacctgttcatttaacgtttgaataaattcgatcgcaaagccgttcgcttcaggctgaggacggtttggccaatacaggaggttcgcaaccgcatcgactcgaaatccatctatatgatacatctcgatccaatacaacgcattcgagattaaaaaactgtgaacttctcgttttccgaggtcaaaattggcggtcccccattcccaattttccctgtcatgctcgtgtttatattcatacagaggcataccgtcaaacaaatacaagccgtggtcatctttgcaaaaatggccgggaacccaatccataatgacgccgatctcatgctgatggcactggtcgatgaaatacatcaagtcatgcggttcgccatatctgctcgtcggactgtagtaccctgttgtctggtagccccatgaacggtcaaacgggtgctctgtcagcggcatcagctcgatatgtgtgaatccgtgttctttgacgtaaggaatgaccgtttcgctcagttcccggtatgtgaaaaaacgtccatccgctttctttttccacgaaccgatatgaagctcgtagatggaaatcggtttttcatacacggctttttgctgctttttcttttgccacttccggtcgccccattggtatccggccaattgataagtgaccgatgccgttttcggcctcacttcagaaaaaaaagcataaggatcagccttcaatttcgtttcatttgcggctgtaatcatttcatatttatacagctccccttctccaataccggggataaacagttcccatatgccttcctgatgacgcttttccattcggtgcaggacaccggaccagccgttaaacgttccggcgattcgaacctccttcgcatgcggggcccaaacacagaaacggaagccttggcggccgtcctgttccgtctgatgagcgccgaagaacctgtagctttcataaagccgaccttcatgaaagagatgcgctttaatatccgaggcactcacaccagccattgatttcatcctttctgccactatatttaaagattactcttttattcggataatatggcttgatccctttaatgaaagcgcttctttttattgacaaagttcaacaattttccttttaaacattgactgatgtcatatttgaatataaaaaaactccgcatcgaaatgatgcagaatttaacatgatgacccgtacgggattcgaacccgtgttaccgccgtgaaagggcggtgtcttaaccacttgaccaacgggccttattgaaaaaatggcggagaaggagggatttgaaccctcgcgccgcttacgcgacctacacccttagcaggggcgcctcttcagccacttgagtacttctccatggctccgcaggcaggattcgaacctgcgaccgatcggttaacagccgatagctctaccactgagctactgcggaatatcatggtgggcctgaatggactcgaaccatcgacctcacgcttatcaggcgtgcgctctaaccagctgagctacaggcccatgatatgcaaatggagcgggtgatgggaatcgaacccacgacatcagcttggaaggctgaggttttaccactaaactacacccgcatttcgcatggggcggttgatgggaatcgaacccacgaatgccagagccacaatctggtgcgttaaccacttcgccacaaccgccgcaatatatagaattgtaaaatggtggctcgggacggaatcgaaccgccgacacacggattttcagtccgttgctctaccaactgagctaccgagcctttgttaaaatggcggtccggacgggactcgaacccgcgacctcctgcgtgacaggcaggcattctaaccaactgaactaccggaccattttggctgcacctttcgggcaatcctcatttaatgagtgaatttggttgcgggggcaggatttgaacctgcgaccttcgggttatgagcccgacgagctaccgaactgctccaccccgcgatgatcaaaataataaataatatatggcggaggaagagggattcgaacccccgcgggctttgacacccctgtcggttttcaagaccgatcccttcagccagacttgggtattcctccgtaacaatggtggaccttgtaggactcgaacctacgaccggacggttatgagccgtctgctctaaccaactgagctaaaggtcctttaatagcggcggagggaatcgaacccccgacctcacgggtatgaaccgtacgctctagccagctgagctacaccgccatggtgaatattaaagataacaaagtggagcctagcgggatcgaaccgctgacctcctgcgtgcaaagcaggcgctctcccagctgagctaaggccccgaatagtggtcgggaagacaggattcgaacctgcgaccccatggtcccaaaccatgtgctctaccaagctgagctacttcccgttatataatggcgcgcccgagaggagtcgaacccctaaccttttgatccgtagtcaaacgctctatccaattgagctacgggcgctggatgattaagcggaagacgggattcgaacccgcgacccccaccttggcaaggtggtgttctaccactgaactacttccgcaaaatagattggcaatgcggatgaagggacttgaacccccacgtctttaaaagacactagagcctgattctagcgcgtctgccaattccgccacatccgcatgaaatggtgagccatgaaggactcgaaccttcgaccctctgattaaaagtcagatgctctaccaactgagctaatggctccaatactgcaatgaaatctgaagactttttcgaaagctatctgtcttttttcagcaacttttatattgtatcataaaatcgtggtgccggcaagaggacttgaacccccaacctactgattacgattcagttgctctaccaattgagctacaccggcccattccaatatgaatggtggaggatgacgggatcgaaccgccgaccctctgcttgtaaggcagatgctctcccagctgagctaatcctccgcgtcagttgttggagtaactctcgatctgacaaggactattatatacgggaatacacccatttgtaaaggctatattaaaaaaattttattttcagtttattctatcacaacagacgaatatggatacttcgttccgctcaatccgcatgatggcatcaaaagcttaggagcaacatttatccctattgacggcttataataggttctccagacgctccatgaattcctgtctcttccccatggtaaatttgtattcgaattgatttttcaaaacaattttaagcccgtttcgaacgataagcaatatatttcgcttctcgactctctctatcccgactcttaatagcatgcggcgtgttttgaaaatgaacgtcgtactgctcaaaatatacgcattcatttgtcaatcctccagctacctcaatccctcgaaatccatttgccggaacatccagcatccactcttctatttgcatgggttttactccctggcttcactgattttatgcatgccaatgtgcttattggcttcatatttccgctttaaaattcggatttgaacacccagaacacgggccagagaagatgaagacagcttgcctattcttcacaccgtttcgcggggcctgaagggttgaaatcgtctatgcactcctgcccttccggtatatacaatcgaacacccgcaaaaaagaccagcttatataagctggtcttcttaagcggagcgacaggtccaacaggagcaacaggtccaaccggagtgacaggagcaacaggcccaacgggagcgaccggaaccacaggagcaaccggcccaacaggtccacagggtccaacgggtccgccgggtgaagcaggaacaatgggagcagctggtccaacaggaccaacaggaccagccagtccacaaactgctatattctttaacaatctatttgggtctactactgtttacaatccgccaacggttcctttaaatacagaagtaactgttgtatcggttcctaatgtatcggtcactagtgggcaaaatattaaggtggattatgcattggctatagaagctgtaaatactgcaaacagtaatataatttttgaaataaggctatatagaggaggaactttagttcaaacaagaatatttaataggagtctcgcggctgccggcactcaaaggtttccattagccagcacaattgttgatacagttcctgccaccgcaacagttgattattcagttagggtagcggtaacaacggcttcaaatgttacttccgctgcagcatttaatagagatttaaatctcattcggttcccttaaagggaggggggaaagctaaatggagctttccccttttgaagtttcatattaagtgaaagaacgttgctttaaagttaatatagtttgattcactcggatttaacttctataaatgtgttttaatcgtatggaaaataacgtgaccgagcttagcaaggagacatagtatatgttagcttcattctcgaaaagggaattgaagctaatctagtgaaagggaggtaaaatcctagatgtcgatccaaaatttggttgtaaacggcagctttgaaaacggggcacttccaccctgggtaggccaaaatgcaaccgtcacaactcaattttctcattcaggtttttggtcggcaagattactgggcggggctgttacttcttttattgcacaatttgttccagtagatgcaggagaaggattggaatttttagtttctctagctaaagaaggttttcctgctccatcgcctcaggtgcaaattcaagtgtcttattttgatagttcatttaactttttaggccaaggtctctttttaaatatcccgttcaacagactaccgattgtccaaaataatacatggcttgaagtctatcaaacgacgaccccagctccagctggctctactatggctttcattttgattaatactttgccgcaggcaggtacagcgaatgtcattgtagatgatgtagcactattagatgtagaaggcggaggaacaggtccaaccggcccgacaggtccaaccggcccaaccggcccgacaggtccaaccggtccaacaggagcgacaggcccaacaggtccgacgggagcaaccggcccgacaggagcgacaggcccaaccggtccgacgggagcaaccggcccgacaggagcaaccggcccaaccggtccgacgggagcaacaggtccaacgggagcaaccggcccgacaggcgcaacgggagcaaccggagcgacaggagcaaccggcccgacaggagcaacaggtccaacgggagcaaccggcccgacaggcgcaacgggagcaaccggagcgacaggagcaaccggcccgacaggagcaaccggcccgacaggagcaacaggtccgacgggagcaacaggcgcaaccggcccgacaggagcaaccggcccgacaggagcaacaggtccgacgggagcaacgggagcaaccggagcgacaggagcaaccggagcaacgggagcaaccggcccgacaggcgcaacgggagcaaccggtccaaccggagcaacgggagcaaccggcccgacaggtccaacgggagcgacaggcgcaacgggagcaactggagcgacaggcgcaacaggtccaaccggagcaaccggcccgacaggtccaacgggagcgacaggcccaacaggcccaactggagcaaccggcccgacgggagcaaccggagcgacaggcccaacaggtccgacgggagccacaggagcgacaggagcaaccggagcgacaggagcaacaggtccaacgggagcgacaggcgcaacgggagcaaccggcccgacaggtccaacgggagcaacaggtccaaccggagcaacgggagcaaccggcccgacaggcgtaaccggagcaacgggagcaaccggcccgacaggagcaaccggagcaaccggagcaacgggagcaaccggcccgacaggcgcaacaggtccaacgggagcaaccggcccgacaggagcaacaggtccgacgggagcaaccggcgcaaccggagcgacaggagcaaccggcccgacaggagcaacaggtccgacgggagcaacaggcgcaaccggagcaaccggcgcaaccggagcaacgggagcaaccggcccgacaggtccaacgggagcgacaggcgcaacgggagcaaccggagcgacaggcgcaacaggtccaaccggagcaaccggcccgacaggtccaacgggagcgacaggcgcaacaggtccaaccggagcgacaggagcaaccggagcaaccggcccgacaggagcaaccggcccgacaggagcaaccggcccgacgggagcaaccggagcgacaggagcaaccggagcaacgggagcaaccggagcgacaggagcaacaggtccaacaggagcaacgggagcaaccggcccgacaggtccaacgggagcaacaggtccaacaggagcaacgggagcaaccggcccgacaggtccaacgggagcgacaggcgcaacgggagcaaccggagcgacaggcccaacaggtccaacgggagcgacaggcgcaacgggagcaaccggagcgacaggcccaaccggagcaacgggagcaaccggagcgacaggcccaaccggagcaacgggagcaaccggcccgacgggagcaacgggagcgacaggagcaaccggcccgacaggagcaacaggtccaaccggagcaacgggagcgacaggtccaacaggtccaaccggagcgacaggtccaactggcccgacaggtccaactggcccgacaggtccaaccggcgcttaatatttaacgactattagcaaatattttccgtttgtttttccggaacttcgctggaatgctatgcgaatgattcagggggcagtaaacctatggtttactgccttttttctattgcttatttctaagaataaaaaaacatccctgtcactattttgtgaaagggatgtttttgattgattagcctttacgttggctaaatgattgaatggctgagactacctgatccacattgacttgatcatggcagggaagggtgatcgtattttgttccagaaaaatggaattcggtttaatctgcctgtatttgcggcggtaataggtagtgccgcttaaacaataagttccgaaagtcgactctatatggcagtcgctcaaatattgaatcaattcgtcgcgaacgatgttttttggaactttgaaaacggcggattgtatgttgtgtacaacgttaggaccgatttgttgactttggaatccgaggggttcaagctgttcactatatgctttctgctgaaggtttctccgatgaatgatgtcatcaagtttttggagctgtttaattccaagagcggcttggatatcggataatctgtagttgtagccgaaatctataaaatccaattttccgtcagagatggcagcgccatggtttaatttgaccgaaagccagtctttcaactcttcccggtcggttgtaattgccccgccttcgcctgtcgtaagcagctttcttgggtgaaagctgaaacaggtgagatcggcaatttttccggatttacagccgtattcgctgctgccgatcgcacaagcggcatcatccacaaggggtaagccgtactccttacaaatttgcttaatgttggtgatgcctgtcgggtttccaagagcatctacaaaaagaacggcttttgtacgggacgtgatttgactttccagttcttctggaagcatgttaaatgtttcaagatcaacatcggcaaaaaccggcttggctcctaaatcttctattacattgacagtggcggggaacgagaagtctgagacgattacttcatctccgggttgcacgttcaggcttttaaggcacatcgataaagccgttgttgccgatgttgttaaaaaagcatgctttgcactgacatactgtctcatatgatcagcaaatgttctgacataagggccttttgtcagcatgccagaggaaaatatctcctttaattctgcttgcacttcttcaaatgtaatatacggctcgatcaatctgatcatgagagatcctcatctttcattcttcggtttttaatcacctttgccggcacgcctactgctatgctgtacgggggaatattgcgattgacgacggcatttgctccgattttggagtgggcgcctatcgtaacgcctgctaggatagacgcaccgatcccgatgttgcagttttcttcaatatgaataggagcgaatgtaagcggcgaaaacaaaatggtactgtcgggtttatcaggatcggtatggtaagcggcatgcatccggacgttcggaccaattcctgcaaattctccgattgtaaccccgccggcaccgtgtataaaacattgctgtccgatccagctgtttgaaccgatgaccaggtcatgcttataatagccttttaaaatcgtgtcatggccgatataaacgttatctccgatatagatgttttccggatgaaaaatgcggaccccgtcttcgataacgacgttttcgccgcagcccccaagctgggaaagagtgaattcaccttttccttcgcttttccattgtttcaacaaaagcgcctcctttcttattgctccaaattttttttaatgctttcagctgttcttctgatgccttcttccagatcaactttagcgctgaaaccgagcatctcttttgctttattgacctgagggatgcgcagttcaatatcggcttcttttttctccccaaagaagatttgtgattttgatccgagaactctgataatcgtgcttgccaatccgtatacggtgatcacagtgcgttcattgccgatgttgaaagactctccgacggcttctttcatcgtcaaacagcgcaaaattccgtcgatcatgtcatctacgtaacaccaggcccggatttgcgttccatcgccgtgaatatagatcggctcatccaacagagctctgtgaaccatcgttttgatggcgccttcgccgacttgttccggtccataaacattaaaagggcggacggtgacggtcggaagccccagttctttaaaataggcatatgccatatgctcctcggcgagtttgctgacagcatatgtccagcgggcttctcccaccgctcctaaaacagtatgactggtctcgcgcgctctgaaagcgatttggccgaacacttcgcttgtactgaaacagacaacccttttgcattcggttaaaccggcagccgcttcaagcagattggctgaaccgatcatgttgacctgcatcgttttaaccgggttttgaatgaccgtgtcaatcccagcgatgccggcggcgtggacaatgtggctggccccctggatcgcctttttaagcgcgttcaaatccaaaatgtctccctgcaccactttcaagtgaggatggtcccggtaaggcttataccggagggagtctcttgaaaaattgtcatatacggtgacgctgttgcgctctatcagctttcctattaaagaggatccgataaagcctgctccgccagttatgaaaatatgctggccggataactctgtcatattgctcatcaattgttcacctgcttgtttcgtttttttgacatacaaatcccgcgacgggaaagttgttcaacttcattccgaaagtagcgactgataaacagccaatgtttttttgctgtttttcaccatatcatgatgaacttctgcatactttcttcctttctggccgatttccggcagcatatcccggtttttcagtacactttctatcacctctgtaatgttggcgggatttgctcttatgagaggcagttcggaaggatagtgatccttcataaaatcactgatccagcagataacgggtttccccattgccatcgattcgacggcaaataatccgttgcttccgatatgaagctgatcaatgatcaaatccgccttttgatagattttctttgcctgttcatgagaaaccccttgtactaggtgaaaatgaaaatcgtatttttcttttaaagattccaccgccttaaggatgtggcgggttccttttattccgggagaggtgggggcatgaacgatgagcggcttttcatttgacctgtagtcgggagtatagcggtcaagctggatcatggtcggaatcatgtggacatgctcataatagtcttttacatactcgtaaagctccatatcggcgacgatgcagtgctggacatattgggaaattcgtttgaggtggtatcgaattcgagcttcgtttttcgttttaacaacggcgtatggatttgttttagccaatgttgaataaagcctcacatcgctgccccaatgatgcatgaccattggtttctcagcctgttttaaaatgggataatccgacatgtccagcgtgaagcttgtgccgaaatgaaaatggaacaaatcataggatggcaggagatcattggcaagccttctcagcttcgcattcatggcgggcgtattgcgttctttcagcaatgaccaggtgtagtcggcagcgtaatttaaataatacggatagtaatttaaagtgtgggcaagcgcgccatgctgtgagagccctttagccaaggtattcatttgattggcgatttccattgtgccttgcaaaatgcggatttgcccagccggaggttcggttttttcgtcaacaggaaggtcaagcttcggcgcgcttgcggtttctgctccatctcctttttgaagataggctgcgctttctttttcccttccggtgcgcaggcacacttttcccatcagcagatttaaagatctgttttcaggaaaaagatctagccctctccagagccacagccaagcgttatggtcatggccgagataaacagaaagagaggcttgaagaaaataaaagtcaggctcgttatgcgatccctcggcttcccactcctttaggcgcttcatggctttgttccactctttttgttccagacaatgaatgatatctgatttgaaatctttcatgatgacctcccatcgatcatgctgattcaatttctccttttaaatagcagaatacaaaacactttgtgcgctctatcatacgtataaatgaatctatatgactgtgtatttgtgcgagagtgcaagagaaaaaccttccaaagaacggaaggttttatatcagctggatttttttaatatttttcatatatcgttcatactgattgtctgaagcgaggcttaattggaagtactcatccattttgttcaggagcggctgaatgcattcttttttgccgtcatggtctagatgccgggtatatccgttttgtgcgtatctccgggccattctccaaaaggttttcccgatgctgaaatatttcaaggactgtctttgattttcctcaagctccttccatttgatatgaggaaaatagacgctttcgtcaaattctttcacaatataatccatgacgtacacaagcgattgaattcttttatgcaattggtaggaaatgtttttttggtggcggcggtagcataatacaggtttttttaaatagcgccgcttccagccgcgcttcgtattggctaaacaattcagcacatcccctgcaagcggcttttgcggatcaaccagccaagtgaagcctttttgctgataataagatgctttaaacatgcccaccatcgggacaatgcctgagccgcccctttgaaaaatcgtcctcaccagctcctcatcgccatactcttgatatgtccacagacccgcatttttcccgtgttgatcaacgagcaaaaggtcgccgtaaacataatccaatccctcttcttcaaaaaagcattgcataaagtcatggatcaccaaattgtgcgggaggaaatcatctgcgcttaaaagcaaaacatattctccctttgcctcttggaagatttccttaaaagcgagatcaggaagttttgtattttcgctgtggcatatcgttcgaatgtgcggatgcgttttttgatagctgctgattttttgcatggagccgtcagttgaatggtcgtcaacgatcagaatgtcgatattagggtagagttgatttaaaacggattgaaggcattcatcaataaaattactgtaattatagttgatgatgcctaccgtaatcagcggcggatttggcataaccgtcaactctgactgctttgcaaagcctgaaatcatctcttcaattttgcgcatgctcaggtcatatgaataatgctcttcaataaacgaccgataatggagagatgtataatcaccgcttgtgatcatggccacgaattcatctattgtattccaaacaactgattcatcgtatatcgtctttgcgccgtaaaaattgtgaatcagcggttttatgcctttagccatcgcttccatggccgacatatgctgactttcaagaaggctcgtgcaaatcaggtaatgcttatcttccaagtattgattcatatcatcctgccatccgtcaaattggacgttgtcagtcagccggagctcatcaatcatttgattgaaatacaactgatagcgggcgtcctgaaacgtcccggcgataaacaatttgtatcttgggtctttgtcaatcagtgctttgaaagcctgcagcaaaagcatcggcccttttttatagttgatatagccgacataagcgatgtgaaagcctttttgcctttgtttaaaagtgtattgatctagcttgattccatttggaacgacggccgttttctcttttttcaacgccttgacttgatccaatacgtattcccgcaaatgctctccgtcaaaaatcacttggtccaccgcttgccaatatacctttttaatataaaaagtaaatgcttcatagctgtggagtctgcatattaatgttttagccgctgcagaagggactttgctcccgtggatcaataaatcatcgcaccattcaaaccagcaaatatccgcccattgcatgccagcgtcgatttgattcaggtcatgaaccacgattttttttgtccggtaagttccggaaaggtgctcaacgacagaattcaaaaaccggtccaaatccggtttgacgaaaaaaatgatttttggacgcctgaccatttttttgaaaaggtcttctttctccttcatgaggcgaggtcgatgttcgcgcctgacaaataggagggcatcatcatataattcagacgctctctgagcctgctgctttttttcacagacaaaagcagcgcttatcagcaagccgggatcgaagggagcggctttcagcttctcttcaagcttctgcgcagcatcgtgccatttgtgatgaaaaatcagttgggatatttcagtttctctccagctaagcccaacagagtctagcagatattccaattcattatccatctgaaacctcctggttaaacacattttcgctagtagtatctatattcaaacgaaaaaagaaagttctatgaaaaatactttggaaatggcgcagccttgaaaatataaaacagtgatagtggcacaaacgcgatcagctgctgtttcatattttatgggtagattttaaaaaagagtctcagggagtgaaggctttggttacaatcagtctatgtatgattgtcaaaaatgaagaagaagtattagcgagatgccttgatacagtgaaagacattgtagatgagattaatattgttgatacggggtcgacagataaaactgtagagattgcgaagcgatacacagaccgcgtctttttctttgaatggatcggcgattttgcggctgcccgcaatgaatcgttcaaacacgccactaaggattatattctctatctggatgcggatgatgttttgcttgaagaagatcagaaaaaactgaaagagttgaaggaaacgcttgatccttccgttgattccgtgtctatgtactatgatgctggaaccgacgaattcggaaatgtgacattaaggtaccgccgcaaccgtctggtgaaaagggagaagaactttaaatggaaaggcgactgccatcaatatttggaggtattcgggaacatcatcaatgccgatatttcagtgacgcataaaaaaatccgccactctgtcggacgaaacctcaatatttaccaaaagaagattgatcgcggcgacacgtttaccccgcgcgactatttttactacggtaatgaattaagagaaaacagacactacgaaaaagcgattgaaagctacaataaaaacattgaaatgaaagaaggatggattgaagacaaagtatacgcctgcatcaacaaagccgactgccaccgctttctcggcgacatggacaatgagctgagatctctgttccagtcatttgaattttctaaaacgcctcgtgccgaaacatgctcaagaatcggctataactttcagcggaggcgggaatacaaggccgctatctactggtatgagctggccacaacattggtgcctgattcaaataaatggagcttcacctatccggcatactatacttggtaccctcatttgcaaatgtgtgtgtgctattacaatttaggagactttgaaaagtcgtatcatcataatgaagaggcgaggaaataccgtcccgaagacaaatccgtccttcataacaaacagctgctggaagggaaattaggcattaacaattagcattgtaaagacttactgaacaagtaggtcttttttttatgaataaaatcaagccgtgccaatttagcggcaggcatcataacttattttggaactttttgaatttagaggaggaacaaaggatgatcccgttagtcaatttaaaacgtcaatttcaaacagtaaaacaggatattttaaaagagtttgaacatgtgctggacagcggccaatatatattggggccaaaggttgaagaattagagaaaagaatagctgaaaagcttggtgtaaaagaagcggtcgcggtcgccaacggaacggatgcattggtgctgacgcttgaagctttcggcatcggcaaaggggatgaagtgattacgaccccgttcacttttttcgccaccgccgaagccgtctcaagggtgggggctgaacctgtgtttgctgatgtcgatcctgaaacatacaatcttgatccgaaaaaaatagaagaaaagatcacccctgctactaaagcgatcattcccgtccatatcttcggacagccggctgatatggacgagatcatggagcttgccaaaaaacacggactgcttgtgattgaggatgcctgccaagcgttcggcgcatcgtataaagagcggcctgtcggcagcatcggggatgccgcctgtttttcatttttccctacaaaaaacttgggaacattgggagacgggggaatggtgacgatttcagacccggatgcagcccggcaattaagaacactcagaacccatggcactagcaaaaaatacttccatgacaaaatcggtttcaacagccgtcttgatgaattacacgccgcagctttactcattcttcttgagaaaatcgacggctggaatgaacaaagaagaagagtggccagccgctacagagaaggtttgaaaacggcggagcacctcacactgccggcagagaaagaggaccgcacacatatctatcatctctattgtatcggcgcgaaaaaccgcgactacatcatacaatcgctgaaagagcaggacattcattcaggtgtgtattatccttgctgccttcatctgcaatcggtctattcttcactgcagtacaaaaaaggcgattttcctatagccgagtccttgtccgaaacccttttcgccattccgatggatccttttctagccgccgaggaacaagatcagattatttctgcgctgctgaaaaaaggaggaggggaaaagtgacggttcattttggtttaatcggctgcggctatatgtcaagaaaacatcttcaagcactggccgagtgcgatgatgcaaagttgtcggccgtcagtgatttgcaggaagaaagaatgaaggaagcggaagaatactatgcttccctcgccggtgaggaaagccgaatgacccgctatccgcagtatcaagcgctgctttcagatcctaaaattgaagcggtcattattgcggcggtttcgggactgcacgccgaaatggccaaacatgcgctgctggcaggcaagcacgtcatcgtcgaaaaaccgatgaccttgtcattacgggatgccgatgagcttatagaactggcggagcagaacgggctgaagctcatggtctgccaccagatgcgccaccggccgatcatgaaaaaactgaaggaaacgattgaggaaggaaagctgggaaagatctacttgggcacggtatcgctccgcttaaacaggtcccccgcttattatgaagcggcatcctggcggggaagctgggaaaaagacggcgggatgctggtcaatcaagggatacatctgatcgatctgctgcaatggtttttaggtgatgtaaaaggcgtttacggagatatgctgggcggctccggagctaaagaaacggaagatgttgctgtcggtattctgacgtttgccagtcaggcgaaaggtgtagtagaagcgaatatcgtcacacagccaaacaatatcggaagctctctctcgatttttggagaaaatggaacgatttcattggaaggtccggcattaaaccggatcagccgctggtacatccacggggagaaggcggatgctgaagaagcggcaaagctgattgacatcggcggcgaacaaaccgcaatgtatcaaaactttataagcgccctcaagcgccaagacacgctattggttgacggctatgaaggaaaaaaggcgattgaaaccatctttggaatctatcaatctgtgctgcagaagcaaccggtgcagctgcctctttcttcatttcaaacaactgatatgaaaaataaataggttttgttttggtagatcgtccctttcaaaaaaagatttgaaacatagtttattaaaggaatgtacagaaggggcgagttgataaatgagcaaacaggaaattcataacgaaacgatagcggtcatcggcttggggtttgtcggtctgcccttggccatgttgttgatatcaaaaggaatgcgggttatcggtgttgatttggacaaaaagaaagtcgaggcattgcggaaaggaaccagctatatttcggatataaacgatcaagcggtgcaggacggaataggcaccggtttctttcgtcctgtttcggactacagtttaatcggtgaagcggatgccgtcatcatctgcgtgccgacgcctttgaatgatgatgcgggtcctgatttgaattatgtgaaaagagcggcgcaattgattggagcgcacttgaaaaaagggcagctcgtcgtgttggaaagctcgacatatccgggtacgacaagagacatcgtcaaaccgatcctggaaaaaagcggccttgtatgcgggaaggatttttacttggcttattctccagaacgcgttgatccgggcaatcagttcccgattgaggtcgtgccgaaggtagtaggaggagcgacggatgcatgccttgaaaaggtgcatcaattatacagcggcatttatgaagaggttgtgcctgttacatcgccagaaacagcggagctgacaaagctgctcgaaaatacgtaccggtttattaatatttcattcattaatgaattcgcgatgatatgcgacaggctcggggtgaatgtgtgggaagtcatcgaggcggcaagcacgaagccgtatgggtttgcggctttttatccaggccccggcatcggcggccattgcatccccgtcgacccgctgtatttgcagtttgtcatgaaacaaagcggattatcgagcgactttatcgagctgtcggaagcgacaaatgatagaatcgtccgctatatcgcagagcgctccttgcagctggcagggaaagacaaggcgacagacgcccgcatcttaatctacggcgtcacctataaacgaaatatcgcggatgtccgcgaatcaaaatcgcttgatattatagagaagctgatcggcatgggagcagatgtttcctaccatgatccgcacgttccggacctcgacctcagcggcaaaaagctagcaagcgtgccgatagattcaaagatgctgaaagagtatgactgtgttgtcattttaactgatcatgacgcactcccgaaagagctgttattaaaccatgcaaacgtgatatttgatacgagaggagtgctgagggaagcagccggaaaagcaaaagtcatccagctcggaaacgggcgctcctgaatcaatttttctgcagcgactcacgcccagatccgttcggaatacaataagttaaaacaagaacgaaaagggtgagggccgtgtggatcggaattctgttgatggtctctgggattgggatcagtattttcgccgtcagtctgattgtcagctatttgtttgttttgccgaaccggagcacatatgaagaaacttttttcagcggactcaaacacggcgagatcatcgatgacgtgtttgagtcccacgacaaagaagagctgtttttgacagcaggggatggatgccggctgcatgcgctgctatttcccgttcaaaagagcaggaaagccgtcatcatctcccacggcatcaagtggtcgctgtttggcgggtataaatacgtcgagctgtttcagtccatcggctacaatgtcctgctttgcgacagcaggtgccacgggttgagcggcggttcacacgtttcctacgggttttacgaaaaggatgatttggcgaggtgggctgacgagcttgagaacaggttcggcaaagatctttggatcggggtgcttggcgaatcgctcggagcggcggctgccatcgagctgatgaaacaggatcggagaatcaagttttgtattgccgattcctgcttcagcgatttaacagagctatgccgctttcagctgaaagccgccgtcaaattgtccgtgccgtttctcatcccgttggcaagcgggctgatcaagcggcgccacggctggagccttgctgatatatcgccggtcagcaaccttgagcagtcagacacgccgctgttgatcatccacggcacaaaggatcagcttgttccgccggaaatggccaaaagcctgtatgagaggaaaaagggattcaagaaactgtactggattgaaggcgccggacatgtcggcggatttcgccacaatcctgaggaatacttaaataaaatcaaagactttatcttgaaaatcgagccggccaattagccttgcgattccagtttttcagcggctgccgatctttggcgcgcttccttgattttgccggcgtaggacgttccccaattcatcatttgccggatgatcgggatcagcgtcttgccgaactcggttaaactgtactcgactttcggaggaacctgtttgtaaattgtacggcagacgatgccgtcgcgctcaagctctcgaagctggagggtcagcatccgctgagtcacgccgggaattaagcgccgcagttcattaaagcgttttttatcatcgatcaagtgatacagaatgacgcttttccatttgccgccgatgatatcgatcgttgcttccaccggacatgaataaccgtccggtgcttcgcatgctgccggatgttttttcattttcttctctccttagtataaaaaatgatactatgccacaaaaatgtgcgtactttcttattgctattataatgattagaatgaaattgagaaaggaatataaactatagagaaaaggagagaacataatatgacagagcaatccaagaagcaagagattcttgacgcattccaatttagacatgcgacaaaagaatttgatccggacagaaagatatcagatgaggattttcagttcattttagaagcgggcagactgtcgccaagctcggtcggcctcgaaccgtggcaatttgtcgtcgtccaaaataaagagctgcgtgaaaaactgcgtcaagtctcatggggtgcacaggggcagcttccgacagccagccatttcgttttgctgctcggacgcacggctaaggaaatgcgacgtgattccggctatgttgcagatcaattaaagcatgtgaaaaaaatgccggaggacatcattgaaaatatgctgaaagaagacggcgttctggaaagtttccaagacggcgattttcatttgtacgaaagcgacagggcgatgtttgactgggtatcaaagcaaacgtacatcgcgctcgccaacatgatgacggctgccgctttgatcggcattgactcctgcccgattgaaggctttaactacgacaaagtccacgacatccttgaaaaagaaggggtgttggaggatggccgctttgacatctcggtcatggccgctttcggataccgtgtgaaagagccgcgtccgaagacgagacgggcgcttgatcaaatcgtgaaatgggtcgaataagaaaagtgcggttctgcataagcagaccgcactttttatatttagatctggagcttgcgccgcttcctttggtaaaggtacaggccgcttccggatataagcaacagcaggccgagcatcagccaatgataggcgtttgaagcggtgtcaggcaaaaaaccgccgtttgaaccatcggaaggttcatttccgtcatctgctccgccgctgtcatgaccgcctgatccgtctccgccgctgccggcgccgggcgaagcagggggttcaccgccgctgccgccatccggagtgtcatcatcgccggaacccggcggaagggaaggcgacccggcatcattgtcattcatcacggtatactcgctgaaatggtcgacatagcctgcaacggtacggcctttcgtatagccgtttgttacttttgtgaagctgttgtttttgcggtcgacataatagacgctcaaatgtttatcaggagcatcgacttggaacaacagtccgacaggctctttaaatgtgctgaccgttttaccattctgctgaatgttgaaatcatatacctttgtgaccgcctgtttgatatccttggcgattttaatgctgatttttgtcttttcgcttgccagattaacggctggaagctgcatcgcaatgcgatcgtttttcagggtgatgcttggatcaccggttctttctttgacaaggtcagtctgtgcttttgtcatattcagcttgatgtgttccttttctgtgtcagggaaataggcaatcgcctgatttgcgtttttcccgtatgtttcgaacggcttttccgcaagcgtccaagtgccgtctgcctgacggtcgggaaggaacacttctgtgattctgttctcgatgttcggtgaaacagaatcgtataaggcaagctgctctgtaaaaatgtcgtaatcggtaaagccgagatcgacaccgtttttcgcttctttaaaaacggaatagccgtctccgccgccgcccatgaagttatttgtagcgacacggtaggttttgtccaaatcgagcggaacagcgtcccctttgtcattgactaggttcacatcaaggattcgctcaccttttggcttgctcagtgtaaaggtgaaggatagacccgaaacatgcggaaacgcgcctccgccttcttcgacttggctcaccccgtgctcaagcgcttctttgatttgcgcccccgtcaaatcagcggcataaagggtgttgccgaacggcatgaccgtcagcacatcgccgagtgtgatttcgcctttggcaataccgcttctgattccgccgccgtttgtgatggcgatgtcagctccgccggcttgttttgctttcttcagcatgccgtccgcgataaaattgccgaggttggtttcttttgagcggacatgctcgcgttttccgtccagcgggacatcggcatagcctacttttttctttttcagttcgtcaatatcttctttaaagccgtcaagcacttctttcccaggagggtcttcgtccactttgtcgtcgatcgcgatcaaattgaaccttgattggtccgtttgaacgacgccgttctcatcaaacaccacatcgacccttcccaaaaactgtccgtagtctttcacttgagcgacgattgtcggttcttcgttctccaccactttcaagtgatcgacaagtgtatgcgtatgcccgccgataatcaaatcgatgcccttcactttcttggcaagctccagatcccggttgtagccgaggtgggtgagggcgatgattttgttgaccttttctttttctttcagttccttcaccgttttctctgctgactgataagcgtcatgaaacgcaatgttcggaccggggcttgatgtatatgacgtatcttccgtcgtcaagccgaatacgccgacttgttcgccgtttacatcaagcagaatataaggatagatgccgctttctttcttttttcccgctgctaagactgcaggctctttctgaaagcttcgcagcttcggctcttttgatacatccacattggagctgacgatcggaaaatcgggcttttccagctggtgtctgtttaacgggtctacggctgtatagtttccgctgagaaagtctgcgagcactttaggccctttatcaaattcatggttgccgaaggtcatggcgtcatagcccatcatgttcatcagtttcaaatcggcgagtccgttccattttgtaaaatacagatcgccggaaaagacgtcgccggcatcgagcagcacattgttttctgtttcactgcggatttctttcactttggcagcgcgccttgccgctccatcaaggtgggcatgcgtgtcgttcgtgtgcatgacggttaatgtccagttttcatcatcaactggaggctctgaaccgtcaaagttcagcttatagacgccatatcctttgttttcggattccctgacaaaatcgatgtcattcgctttttcagcaaacggtttggcaaggagggaagactcgaatgtcacgtcggctcctttaatcggagcgatcgaccagttgttgtcggcggcgggattgaccgttttcttctccataatgtagttcatgagcacctgcctgttttcatcagccgccgcataaacgactttgtcctgagtcagatgcgggaatccgccgcccccggaggcgcggtaattatttgtgacgacaaggaattcctggtcgtcgcggacgggttttccgttgtaagacaactgtttgacgcggttcgcctgcggatttttcaccccgcctgaggcattgtattttgcaggctgtgtgacatcgatctggtaggtcacaccgtcaatgacatcgaaattatacgacctgaaatcgggattgaggagcgcctgttcacccgattttgaaggatcgatctgattgaactgcccggccgacatttcgatccagtccttcacttcgcttcccgtcagtttgacgatatagagcgtattgtcgtacaaatacaaatcgccgatgtttttgatcgcaaggtttcctgctttaatgtttgtataataaccagcaccgttgcgtcctcctgctttgaacggcgcgcccgctgataaaatcggcaggttttcgtattccgttcccttcatgacatcttccgcataccatttttgtgcgtctgtgacaatctggattgaaggatcgtcttttacctgcgcgaaaaagctgttaatatcagcttctgtttggccaaccggcgcgcggacgtattcgagcgttttttcgtgcgtatctttaatcgcggaaacgacggtttcgtttcgcgacatcacatttccggcaatcgcttccgtttttgcgctggcatctttcactttccatttgccgccgtccagttcaagctgcatatcgataattcctaaatggctgccccagttcttcggcatgacgacaggaatgccgttgatcgttcctttttggttgtcgatcacgccgttaccgggatagtcggtgccggggaacagaccgtgctgatgtccggagatgatcgcatctattccttccgtcttgagagccaggtcgtatacggcgttttcggctcccgccgcctgttcgccattttcaattccggagtgggcgatcgcgatgatcacgtcggcgccttcctgtttcatttttggaatcgtttctttcgctgattcggtgatgtcctgcactgtgattttgccgtccaggtgctttttatcccatgttaaaatctgaggcggaacgaagccgatatagccgactttaagctggtgctttcggccgctttcatccgtcaccgtccggtcttcaatatgatatggcgtatatttgttctttccgtccggtgttttaatattggcattgacgatgggaaattcggccccttttatcgtgccgtcaaggaattcaaggccgtagttgaattcgtggtttccgagcgtgccggcgtcatattgcagtttgttcatgacatcaatgatcgggtgtgttttcgttccggagataatcgattcacgttcatgtttgaagatgtattcccctagagggtttccttgaattaagtcgccgttgtcgacaagaatcgtgttaggattccggctccggtacttttcgatcagctgagccgttcgtgccagtccgaattcagccgtttctttgtcggcatagtagtcataatccatcatatgggcgtggatatctgtcgtacccaagatgctgaggctgatcagcgggtgttcgttttgttcttctgcatatgtctgggtgtttggcatgagtaaactgagtatcatcactgaggttagcagaatacggagaatgtttttccttgaaaaccgtcttttctgtattcccaccatttctccacctttcagattagagtaacaatttctattgtaagaactttttgtaaagttttgtagaactttcgttgcgaatattgtaaacactcagaaaatgattccaaagtctgtctctgtctgccgggtgacttaggtactttgtcgcgagggcgtggggatgttttatttagtgtggcaggggtaaatagatttatgtagacagaagcttctgggagggtgatcaatatgagcaaaaaaattgcagttgttctgacagattactttgaggattcggagtataccgagcctgcgaaagcgttcaaagacgccggacaccagcttacggttattgaaaaagaaaaaggcaaaacgctgaaaggcaaacaaggcgaggcgcaagtggaaacagatgcgtccattgacgaagtcagcccggctgattttgacgcattgttgattccgggcggattttcgccggatattcttagagccgaccagcgtttcgtatcgtttgcaaaatcctttatggatgacaaaaaaccggtgtttgcgatctgccacggcccgcagcttttaatcaccgccaaggctctggacggtcgcggtgcgacaggctacacatcgattcaagtcgatttggaaaacgccggggtcaaatttaaggacgaggaagttgtcgtctgccagaaccagcttgtcacaagccggacgcctgacgacatccctgcgtttacacgagaatctttgaagctgctcggctgatgaaaaaagaccggaatagatttccggtctttttttatgtttattttcggagtgcggccagttcctctgcgattgcctgcatttcgctcggactgaaagatttctttttcatcaccatttggtgcaggtattcaaggtcttcaagcttttcattgctgaagtcttcagctttaatgacgccgatgttcagcatgtttaatttctgtgagatctcttcgatcattttgttcagctcggctgttttttgatctgacaagaaggcacatcctttctcactgatttcgtagtctttattgtaacagaattaagcgagaagaaaaggacggctgtcaaaaagcatttggcttaaacagatacgctgttttgcttttcttctttttcggctttgattttggcgaggatctgtttggattcatagacgacaatgcctgtcaaaccgagcaggccgatcaggttcggaattgccatcaggccgttcagcatatcggcaagcgcccagacgaagtcatttttaaagaccgctccgaaaaagacggcgatcacaaagatgatacgatagacgatcgcatatttttcattcagcaggtaggtgaagcatttttctccgtagtacgaccagcccaaaatcgtcgagtaggcgaacagcagcagtccgatcgcgacgattgtcgatcccgcaggaccaagaaagtgtgcgaatgtcatcgatgtcagggcatcggttttttctgtcagatacatatttcccatgacaattgatatccccgtaatcgaacagacaatcaatgtgtcgatgaaaacctgggtcatagagacaagcgcctggcgggccggcatatcggtttttgccgcggctgcggcgatcggcgccgagccgagacctgcttcatttgaaaatacgccccgcgctacgccccagcggatcacggttccgatcgcgcctcctgccacggcttgcccggtaaacgcgtcagagaaaattaaaccgacagcgccggggacaagttcaaagtttgtgacaagaatgatcaatccggcgatgacataaaataaagccatgaccggcacgaacagcgaggtgactctgccgatgcttttaattcccccgagaatgacaagggcggtaaaagtcgtgacaataatgccggttacccaggcaggaacggaaaaagtggagctcatgactccggatacagaatttgactgaaccatattgcctattccaaaagcggcaagcgccccgaatatggcaaataacacgccaagccacttttgcttgaggccgtgttccaaataatacatcggaccgcctgacatttcgccgtttttatctttcacgcggaatctgacagcaagcaccgcttcagcatatttcgtcgccattccgaagaaggcggcgagccacatccaaaatacggcgcccggcccgccggcaataacagctgaggcgacgccgacgatattccctgtgccgaccgtagcggcaagggcggtcatcagcgcctgaaagtgggaaatatcgccttcggaggatttatcctgatgccttgaaaaggcgagctttaaagagtaaggcaaaagtctgacctgcaaaaaagccagcctgaaagtcaaataaatccctgttccaacaatgagaatcaaaagcggaggcccccataaaaaaccgttcattgtatctacaatatgtgaaataaattccataggcgaaatatccccctttaattttgtgtctaactagaatattctgaaagtttgttagatttgtcaatagcattgtcatcttttcttcccaaagttgaaaaaaacagaaaaatctttagtataaaagcaaaagtgttttttctttctgaaaagtggggaaagaatagaggaggctcctgagtgatgatcaaagtgttatttgtctgcctcggcaatatttgccgatctccgatggcagaagctgtatttaacgatatgctcaaaaaaagcggactggaggaccggatcgaagccgattcggctggcacaggaagctggcatgtcggcaaaccgcctcatgaaggcacaaggtcgctgctgtctgaaaaaaagataagctgcgaaggcctgtatgcaaggcagattactgacaaggacccggaagcgttcgattatatcatcgcaatggatgccgaaaatgcaggccatgtgagaagccttgccggctacgggagcaaagccgtcatccggaggctgctcgactatgtcgaagactgtgagacggcagatgttcctgatccatactacaccgggaactttgaagaggtgtacgaactcgtcgcgaaagggtgccgcgaattgctgaaggacattcgaaaagaacacaatttataaaaacgaagggagagattttttatgaaaaacgaccgcgttttcatcagaaatatcctcctcggcgcttcggtcggggcggttatgtcactgctgcacaaaccgactagggaagcgtgcggtgcaaagcttaccgcgtgcaaacacaaagtccgcctttaccgtgcaaatcccggcatgctcaccgaatgcgtgaaagaaaaaatggacgaagccaaaaagctgacggcttccatatcggatgatttgagcttcttaaatcaacagataaaagagctgaaggaaacgacgccaaaagtgatcggcctgattgaggaaacgagggatcacttcacagccaaatccaaaggacgtacggagccggaaaaagaatgagttttttgaaagagctgggctggcgttttttccttcatgaaggaccgagcaaatcggcggaacttgcctacttttttctattgtctctgtttccgtttatgattttcctattgacattgatcggctacctgcctgtcaaaacgggcgatgtcatcgggctgatcgaacagtatgccccagaagacacgatgtccgtcattgaagagaccctgaataccggaaacaggggcctgctttctttcgggatcattgcggcgctctggtctgcatcaaacggattgaacgcgattgtcagggcctttaaccatgcttatgaagtagaggaaaaccgctcttttatcatggttcggctgacatcgctccttttgaccgccgcgatggttttcacaatattggtcgcgcttcttctgcctgtattcgggagggccatcggccattttatcgccaatctggacggtacgccggagatgtttctgacggcatggtcagcgcttcgctggggaatcagcccgcttgtgctgctgatcgtctttacggctttgtacttttttgctccgaataaacggctgtcatttaaattcgtgcttccgggagctgttgcagcgaccgccggctggatcctcgtcagcgtcctgttctcatactatgtcagcgaatttgcaaactacagtgcgacatacggaagcctcggcggcatcatcgtcctgatgatctggttttatttaagcggaatgatgattattcttggaggggaaatcaatgcccttttacataagcgtaaaatcattcctgaagaaaatccgcggaattgagcaatctatatatgaacgtttcatgagttcaaaagcggagggatcatcatggcaaaacacacgaaaaaaggcggcagccataataaacaaaattcaaagcaaagtccgaagaacaaaacgagcggaagcgccaacggacaaaacggatatcattaaaaattgccttaaaaggccggctccagcagccggccttttttacattggcgccgcctcagattgttcgagagcgccgtttttcttcgttttgccaaagagcaccccgatccagatcaacaccatcacgcatgtaatcaaataaaacaggttgctgttatggaatatctgcatataccacccgcctgcaaccggaccgaaaatgcttccgaagctgaatgtaattccgcacatcaagttcccggccgggagaaggcgttttggaagcaggtcggccataaaactgatgccgagtgaaaaagttgatcccacagccattccggctatgaaaaaacatgccgcaagcagaagaacggattcggaaaagcccgcagcaaagaagcagcctgccccgacagccaatatgacaaggagtacatttcgccttccgtacttgtcgctcaacacgccgagcggatactgaaagacgatgcttccgatcgcaaaagccggaagaatgatcgatacgccttcgacggaaatgcccgaccggagcgcatagacgggaaaattgccgttcagggcggtttccaaaaagccgtagccgaatgtcggcaaaaacgcgacccacccaagcaggaaggcttgagcgaaacgcttcaagctgttatcgctgcggctttcagagccgcttttctcagggaaatcgttttgcaggcaaaaaataaacagccatgccagcaggctgaacgcacctgagacgataaacggcaatgatggggcgatgttgacaagcggcgttaaaaaaggcccggctgcaaatcccaaaccaaacgaaaggccgtacaaagagatattgcggccgcgttttttttcagacgataatgtggtcacccaagtttgcgttgaaaagtgcagcatatgatccccgattccgatcaagagccgcaaaaagaaccaaacgataaacgactgaataaaaacaaaggcgaacaaactcgcgcacaccatcaccccgccgatgacaatcagcggtttaaaaccgagcctgcgaagcggcgcttccatgaaaggcgaagcgatcaggacgccgatgtagaggcctgtcgcatgaagcccgttcagtgcagccgaatggccttcctgttcgaaaataacagagatgaccggaaggagcatcccttgcgaaaaacctgatatactgacaatcaaaacgagaatgaaaaagtgaaatctagtcatcggccgattctccttatccgtaatccttctttgatcgtacaactttcagaagttttcaggcaaggcgatttttctttttctttcataagaggtgtgattcatggaaatcgtgtggaatcagaacggctttgaggctgatctggaatatgggaagcttaaaatatcaagcaatgaagaagcgggattcaggccttatcaattgctggccgcttcgattgcggcatgcagcggaaccgttcttcgtaaaattttggaaaagaaaaggatacagctgaaagatatgatcatcgaaacaaaagaagaacgcatttccgaagaggctggccgcatcaaaagcatccatcttcacttcatattgaagggagaaaacctcggtacagaacaaatcaaaaaggcgctgagaatagcgctgaaaaactgcgccatggtgaggtctgttgaaaacagtattgacatcatcgaaacatttgagattcgctgatgtttaaaaacatgcgccgctgcggaatagatcagtatgccgtatataaagcgaaaagttcgcacaaaaataacctacaccaaaaaagaaaagaggaatgaaaaatgagccgttttttcttttggatgatggctgcgggtgttccactttctgtcgcagggagccttctgcattggccgcaggttttattgttcatcatatactgcctgacgatcatcgcgcttgcaagctatatgggaagagccaccgaaagccttgcgatcattgcgggaccgaggatcggaggccttttaaatgcgacgttcggaaacgccgttgagctgatcatttcgattttcgcgttgcgggaaggactgatcggaattgtgctcgcatcgctgacaggatctgtcttgggcaaccttctcctggtcgccgggctttcgtttttcatcgggggcctgaaatataagcgccaggaattcaacgtgtatgatgcgagacacaattcaggtctgctcatgttcgcggtgattgtcgctttcgttatccctgaagtgttttcagctgaaatgacagagccgaggaagctgtcgatgagcgtcggcatcagcatcatcatgattttgctttacctggctgcactttatttcaagcttgtcagccaccgcggggtttaccagacgaatcaaaatgagcaggaagaatcgcatgaagagccggaatggtcgggaaagcgcgcaacattgatcttatttttggcaactgttgccgtcgcctacatttccgagcacctcgtccatacgtttgatacggtggccgaacaattcggctggtcggagcttttcatcggggtcatcattgtcgcgatcgtcggaaacgcggcagagcatgcttccgccgtcattatggcctataaggacaaaatggatgtcgcggttgaaattgcgatcggatcaacgcttcagatcgcgatgtttgtcgcccctgttcttgtcatcagctctttgttttttccaacgagcatgccgctcgtctttaccttgccggagctggtcgccatggcttccgccgtccttttgatgatcatcatttccaacgacggggacacgaactggtttgaaggcgcgacattgctggccgcttatatcatcatgggaatcggttttttccttctttaaaaaaatcgggataaacagagagcatccggaaaacaataaggaaaaagaaacagaaagagtgatagtatgaaaaagcttttgtgttttacgctgactgcgtttttatcctttagttttttcgctgtacaggaagctgacgcagccaagccgatcaagattccaagctctgtcacgaatatttccaaagagaacacataccctaacgcctctcaggatcagccgaggctgcagccgagcgaattagccgaagagctgctgaaaacaaccgatattgcgattgaaaatccgcatctgattaaaatgctgaatgagtcaagcatttccggcacaccgctggcaatcggctatcgggcgacgatttatttgggcagatgggcgctaggttacacctcgaatgaaaccgttgcgaactgggaataccgcaaaatcaacacaaaccgctttgacaaccggggcgggaaagcacctgcagaactcacgtattcccaggaacagacgagcaaaatcaaaggcggcttaacagcgaaagttccaaaggcggaagatgtcaaaaatatgatgatgctcaaagccatggaaaaaacaaagctgccgctcgcctttgaaacagtggtcggctccggtacaaaacgcgatcagatttataaagtgcagccgaaaaaactgggaaatttacacgcctatgcacctgccgtcaatgaaaaaggaaaagtcacctacggcgaagtgtacatcgtattaaaaggcaacaaaagaaagctagtcgtcaaaaatatcacctcgcaaggaatcggcgcttggattcctgtacaggatcacctgacattcggctttcagctcagccatcagccgaaataaaaaagcaagcctttgcggcttgcttttttcatactcttgctgttctggaagtaaaatcaacatcttgataatagctgtttttgacgagcacattcggtccgaggcaccggacgtgcgggcagtggcagttgagttctttggcaagctctgtttttctccacttcgcgtaggcgcttggcaggctgtctgtctgaatgttgccgagcggcggagtatctccgaaatcggtcacgatgatattgccgtcaaaaatattgacgttcaggcgcgatctgccgtcagggtcgtttctgacggtgacgtttttcgcttcgcgcagccgctgtaagagggcgtgatcttcaggatcagggctgcacgcgtaaaacggcagagtgccgaacagcatccacgtattttcgtcgcgaatgtcaagaaggcggtggatcgcttttctcatgtcttttaagcttaaagattcaagtgcgcttgcaaagtcgctcgggtacatcggatggacctcatggcgctggcatttcatgtcttcgacaatttgccggtgaatatgctcgatatgaggaagcgtccgtttgttgagcatcgtctcggcggagaccatgaccccttcatcaacaagcgtccggctgttttcgatcattttttcgaaatagcgcgcccgctgtgcaaacgtcggctttttatccatcatagcgaagccgatttctgcaaagtcttcgaccgttccccagttgtgggaaatatgaagcacatccaggtaggggatgatcagctcgtagcggccgatatcgagcgtcaagtttgagttgatctgcgtccgcacgccgcgttcatgagcgtattttaataaaggaacgacatattcctttacagattttaatgagagcatcggctcgccgcccgtaatgcttaaagaacgaaggcggggaatctcatcaagccgtttcaacagaaggctgactggcagcgcgtccgggtccttcgtctggagcgtatacccgacggcgcagtgctcgcagcgcatattgcaaagagtcgtcgtcgtaaattcaacgttcgtcagctgtatatctccaaattggtcaacgtccatgtaggcttcccacggatcatattccggggtgatcggacgaacctgcattttttctgtcatgacatatctaactcctttatgataggacatactaatatagcccaactattcattttagacctgatccttgaggcatgcaagtcatggatgattgaaaaaaggccgtttataggctacgataaaggaacaaaaggaggagaatcatgggtaacgcagtacatgacaaagaacagcaagtcaattatttgaaaaacagattggatatgtttatgtcagtcatcgattctttagacccggaatcgaccgaccttgaagatattgacagactgatcagcatgctcgacgatttggaagccaaatacgagcgctttaaaaaagactggaaataaaaccgcgcattctctgccgcggtttttttgttttccaagtgttgcttggtatgaaatgctcagcccttctgcacaataagaaaaaataaaactgggagcgagaagatgatgaaacgaatctgtgccatatgctgcggattcctgctgacgctggcgttcagcggcaatgctgaagcgatttccaacaaggcgatccattggggtttttcaaaaagcaaaaaccatcagccggcagatgcgggtcaagagctgaacaaccttttacagcagtacgacgccttttatttgggcaacacaaaggaaaaaacgatctatctgacctttgataacggctatgaaaacggctacacccctcaggtgctcgatgttctgaaaaaacaaaacgtcaaagcggccttttttgtgacgggccattttgtcaaagatcagccggagctgatcaagcgaatggccgaggaggggcatatcatcgggaatcattcatatcaccatccggatctgacgacgaaaacaagccgcgtcattcaagaggaattggaatcggtcgatgaggaggtttacaaaatcacaggcgaaaaaaacaacctctacctgagaccgcctcggggcattttcagcgagcgggtgctcgaagaaacgaaaaagctcggctatcaaacggtattctggtctgttgcttttgtcgattggaaaatcaatgcccaaaaagggtggcgctatgcgtacgacaatatgatgaaacaggctcaccccggcgccatctatctgcttcacaccgtctcgagagacaatgccgaagcgcttgatcaggcgatcaccgacttgaaaaaagaaggttatacatttaaaagcctcgatgacctgatgtttgaaaaatctatgatgcttgagaccctttgaaagaacaatgccccggccgctttgccggggttttgctttggctgaaaaaattgatgcttcaggctctttttatttcccctagtcaattctatagaataaaaatccattttatatacatatattactagatttaaaaagaaaataggtatatcattgatagtgaagggggaattaccatgtcaaaatcagtaaaatcagtcacatcacctaaaaaatttattacaggaaaacgactgctggagaacttgaacgactacattgaagattttggcgacaacgcatatatcatttgcgatgaattcattttggaacgcgctcaaaaagaagcggggaattcgattcagaaagccggcaatcaagccgtttttgaaaaattcaattacgaatgcacacaggaagaaatcgatcgcaaccgggagcttgcacgcaatgcaggcgctaatatcatcgttgggatcggaggcggtaaaacgcttgataccgcaaaagccaccgcttattacgagaagctgccggttgtgattttcccgacaattgcttctacggatgctccatgtacggcccttgccgtcatttataaacacgacggatcgtttgaccgctatctgtttttgccgacgaacccagatgtcgttcttgcggactctgagattttggcatccgcgccgccgcgctttttcgcagccggtatcggtgacgccttggcgacgtattttgaagcgcgcgcctgctttaaagcaaacggcgataacctcgtgctgatgaagccttcaacaactggattgggacttgcccgtctttgctatgatacgctgttggaaaacggtgtgaaagcgatgcaggcggttaagcacggcgtttccacacgagcggtcgaagatacaatcgaggcgaccatctatttaagcggcgtcggtgccgaatcaggcggtcttgccgccgcacacgcgatccacaacggaatgacagccgttccttctctgcacagggctcagcacggcgaaaaagtcacgttcggccttttggcgcagcttgttcttgaaaacgcgccggccgaagaattggagaccgttattgactttatcaaaggcgtcggtcttccgttgacattaaaagacctcggagtcgacgaatttgtcgaagaagaatggcgccaagtcgctcaaagcgcttgcgcggaaggcgacacaatgggcaacatgccgttcccagtcacccctgacgacgtctacaatgcgatcgtcgccgccaacgcgattgcagaatcttatcacgattaatagacgaaaagccgtttccgtgaaggagcggctttctgctttgggttagtatattagtttgtgaatcggcggtctgtccgtgcttttgaatatgaattgtgtggtacgtttcccagagtaaaattatgaatttcttttatagcagtttcccaaaaacgagctgtttgactcgtgtgacagccgttcatttcaccactttaatcttcaacctcggctcttcttcaattccggatgcaaatgcatcctcatttcccggagccgtaaaggtgacgctgtacgtttcctgtgaatgcgggacagttccagctcttccggctgaaagtcaaattcatttattatatcaggggtgagctggacgcgttcggtctttttcccgtagttgttgactttcacctcacagtccatgcttcctgcttccatatcgccctgatagctgcaagcgcttccccttttcatatattccacggcgctatcgccttgtgcattccatttttgaaagaacatcagctgttctgtgaccagcgggtaaaatactgaaataccgatgataaacaaaaacagcttaaagcggatccacggtactccataataatggcgccacgccataatgaagccggcgatgatcataaacatgcagatcagaaccactaaattccggatgggcagttttaaaaagcccgaaagcgcgtctgctacagacgcgccttgatgattctcggcgctgatcaacaggccgataacaatcatgatgatgccggcaagccctgtatgtaccttcatttctttccctcctcagttgtagaaatagtcgaacagagaggaaaaaggtttccggttttacttgaaaatgtcaaaccatcctttatgccggaaccagaagatcatgccggcgacaacggctgccattattccgaggatgaaaaaatagccgtagcgccaatgcagttcaggcatgttgtcaaagttcatgccgtacactccggcaatgaaggtgagcggaataaaaatcgttgagacgatcgtcagcgtcatcataatggcgttcatccggttggagttgagcgtctggtagctgtccctcaaatcggctgtcatgtcacggttgttttcgacgatttcggccagcttcaagagatggtcgtaaatgtcgctgtaatacgcttttcgttcgcggttttcttttgaaatttcaatgtttaaaatccggtaaagcaaatcccgcatcggaatgattgttttcctcagctttaaaaggtcgccacggatatcaaacacctcgttcatcagcgttccatacgttttcctgctgtcgctttcggcaatttcattgaggcggtcttctattttgtaaagaatcgggaaatattcgtccacaagcgtatccatgaccatataggcgatgtggcccggtccgtttttccacaactcgctgttttccgaaagctgtcttcttactttttcaatgccgtctgagtgatgaaaatgaaatgtaacgatgaaatcctttccaacgaataaatcaacttcttcagacgccaaagtcttttgattcaacgcatgtatgacgaaaaaaagataatcttcgtattgatcgagcttgggacgctgcaagcgatgtacgcagtcttcgaccgataaagggtgaaagtgaaaatggcttttgagcaaggagacttcttcttccgaaggctgatcgaaatcggtccaaaaccactcaatatcttgatctgtcagcctttctgctttgttgtcggataaaagccgtccgtcctttgtcatcgcaaaatgtttaatcatcgatacccctccgcttacataggatgctgcgctgtgctgtgattcattcgatgaaaaataaaatgttgttcttttttaagagaatttgaaacatggtatactgtggacaaagaagaaaaagggatgggaagcgatgtggaaggaaactgtaagcgtaacaccgccttatcattttgaccgcgtgttggacaggctttcgcttgatccgctcaatgcggtcaacctcgacaaaagggaggtcaagctgccgctccgcaatcaaaacaaagagcctcgggttgtcgctgtgcaggcgacgggaactgctgaagccccggcgtttgccgtcagcggaatagacgatcgagatgacatgataaaagaagtgaaacggatcttcagatgggaagaaagtcttcagcctgtactggatcacttttcacaatcaagcctatcatcgatttttgaggagcatgccggaacgccgctggtgctcgattttcatttgtatcattgcctgatgaaatgcattatccaccagcagctgaacctgtcttttgcttatacgctcacggagcggttcgttcacacttttggagagcaaaaggacggggtctggttttatccgcttcccgaaacgattgcacagcttgactacaacgatctgcgcgaacttcaattcagcatgcgaaaggctgaatatgtcatcgatacatcaaggatgatcgcagacggccgtttagatcttgatgagcttgatcaattatcagatgaagatattatggaaaagctggtgaaaatcagaggaatcggcccgtggaccgtccaaaacgttctgctgttcggactcggccgtcccaatctgtttccggcagccgatatcggcatccaaaatgccatcaaacgccattttggcttaaacgataaaccgacaaaagaacaaatgcttgaaatgagcaaagaatggcacccttatttaagctatgcttccttgtatttatggaggagcatcgagtagaaatggagagaacatcagtgaaacgtgacaaaaaaggatcatcagcagaattaaaagtcggacagcaatttccgctgacgatcaagcgcctcggcatcaatggcgaaggcgtcggctacttcaagaaaaaagtcgtcttcgtccccggcgcgctgccgggagaagaagtcgtcgtcgaggcgacaaaggttcatccgaaattttccgaagggcgggtcaaaaaggtgcgcaaacgttcagagcaccgcgtcaagccgccctgcatcatctatgagcaatgcgggggctgccagctccagcatctggcttatgaagagcagctgaaaggaaaacgggacatcgtcattcaatcgctcgaacggcacacccgttttgacatcggcaaaatggacatcaggccgacgatcggcatggaaaaaccgtggcactatcggaataaaagccagtttcagctcgggctttcgaaaaacggaaagatggtggccgggctgtacggccttgactcgcaccgtcttgtcccgattacggaatgcattgttcagcatccggcgacgaacaaaacgacgcaaaccgtcaagcaggttcttgaagacttcggcatttccgtctacaacgaacggaagcgcacgggcgatgtccgcacgatcgtgacgagggtcggcttcgagacgggggaagtgcaggttgtccttgtcacgtcaaaagaagacctgccgcgcaaggagctcattgcagaagaaatcaagaagcgtctgcctgaagtgacatctgtgattcaaaacgtcaacaaagccaaaacatcggttgtcttcggcgatgatacaaggctcttagccggcaatatggtcattcaggaatttctcggagaggtttcatttgagctgagcgcccgcgctttttttcagctcaatccgatccagacagtcaagctgtatgacgaagtgaaaaaagcggcaaaactgaccgggcgcgaaaaagtcgtcgacgcatattgcggcgtcggcacgatcggaatgtggatcgccgacggggcaaaagaaatccgcggcatggacgtcatcaaagaatcgattgatgacgccaaccaaaacgccaaaaagcacggaatcgaaaatgcgcgctatgtaacaggaacggccgagcactggctgccgaaatggacaaaagaaggcttcaggcccgacgtcgtcatcgtcgatccgccaagaacaggctgtgaccgcacgttccttgatacgatcaggcaggttaagccgaagcggttcgtttatgtctcatgcaatccgtcaacacttgcgaaagatttgcagtacttggcgaaggattaccatgtagaatacattcagcctgtcgatatgtttccgcagacggcgcacgtcgaatcggtcgtatcgctgaagctgaaataaaacgcctttttaaaggcgttttttagcggaaacaaaagggggatacatgatgaaaagactttgcatcatcccgtgcggggcgaaaaaaatctgggatgttgatccggacatcggctcgtccgccgcaaaggatgtctatctaagcccatttcaccgggcgtgccgcgcatatgcgcagacattttttacggattgggtgattctttcagcaaaacacggttttttaaaacctgaagatatcgttcctgaaaactatgacgtcacatttgggatgcgccacccagagattatgccggatggcgggctgaaggctcaaggtgaacggaaaaacctgatggattgcgatgaaatcgtcatgctcggcggaaaaaaatacaggcctgtactgaggaacgtgtttggcagcggacagcagatcatatacccgctggcgggatatcggggaatcggctatatgctgcaggcgctgaagcgggctgtcgatgaaggccgggaacttggtgaacatgaaaaaaatgagtttttttaaaatcgctggcagggccctcaaaataaaggacagggcatcatccgagagaccggaagatgtttgtttggcgattgggatatcgggaggcaaaatgaaatattcatttttgtctcttttttttatgtgatttttgtaacgaaaagaaggtcagcggtactaataagtgaatggaaaaattaaagaaacagcggaagatttaacacaggaagcattttatcaggctgtgaaaggctggctcccacacatttttgggaaagccgacaatcaaaacacgggtgtttgcgattgctaaaaaaacactttcgttcaggagcgtcgaaagccggggcaaacacaatgattcaccaagttaaggcagcttgcttatctccggaagaacacttcctgaaaaccgtgaaagagcggcggcttctcgaggaaatcaaccggcttgatgagaatttacaggagattgtcagcctccgcatctacgaaaatcggcatgctcacaggcaaaaccgaaaactatgccagggtgggggttcacagggcgaaggtcaagcttcagcaagaaatggaggggtatgatgaaggataaggaacgcagtatattcgaagatttgcttcctttataccatgaggggctgttaagcaaagagacggctgaatggattgaggaagcggccgaaaacgatgaggagcttcaaaagcttttgaagatgtcggaagacgagcttccgaaggaacatatcgagtcgtctgttcatgaagggcaaatgtttaaaagaatcaatcgaaagctctccttgtaccagctgatgtttatggcgatttcattttttctcgcgattcgcacatccctgttaaatgaaagcttcggctttattttgtggtacgccgtgcttgggtttgcggggtatctgtttttctgggatatgaaactcgtgatgctcctctcctttgcgccgattttcgtttgggggatgggggatattttggccggatgggacgcagccggcggtacaggggttgtggagcacctgctgtatgccgtccttggcgctttcgtgctcgctgttattcactgttttttcgccgcggttgggatgatgatcggctggctgttcttaaagctgaaggaaagaagttgatatgatgaaaaagaaagtcttgtatagcgtgttgattgtgctgctcgtttcctttgtgcttgccgcttacaacgccttcaacggaaatcccgtaagcaagaagctgtctcaaacggcgcttgagcattatttgactgaccgctatcctgaaaaagacttgcggatcgacagcggcatctataatttcaagttcacggaatatgtatttgaagtcactgacaccggtgatccaaagcgcaaagatccctatctgcttactttgagagggtttgttcaacctgaagtatacacggacggaatctatgaagagaacctcaatgaaccgctgatggagcggcttggagaagaagcaggaaaagaaatcaaagcgcttttatcaaaaagcatagaccaactgaaagacgttgacgtgcatgtggaagtattaaaaggaaagctgaaaaatgacgcaaaatgggagaaaagcatccgcttagacaagccgatgcagattcatattttacttgatgccgaaaatgccggccgaaaagaagtatacaatacggcgcaaaagattcagcgcctgttgaatgaagaagggtacgactacgaaagcgtgacgattaatgccaacatttttgatggggaagatattaaagacgaggagatcggctgtcttaaatacagcacctcctttgaaaaaaatacggaaatcaagctgaaggatgttgaagagctaaatgattaacgatccatccttcagtttgaaggatgatatcatacatgcaagccgccgcagaaggcggcggttatctgtttaatataagtgtctttagcgactttttgaaaacggccgccagccaatgcgccagacgagaagtatccgtataaagatgacagaaaagcgaaggcctgtgaatctgcatctccctttttcatcaggtttttgtcctgcatcgtccgaaagtagtctgttaaataacaaaggagctcctccatatgctttaacagagaaccgaaaagatcagtcatccttccgccgtcttgaacagcgataaggtagagcggcttgtttttttccatatgaagcaaatacgattctgcaatcaatgttaagtctttctccaggttccaagtgatatcgttttcaaatacgcgctgaaaggctggtatataagaaaattgttgaacggccgcttccaaaagtccaagcttagttttgaagtggcggtagaccgtcatctcgctgacgcctgaatgaagcgcgatatcctttattgtcaccgacttgaatccgtatttttgcattaagtctaaagcagcagatatgatccgttcgttcgtctcttgcaaaggtgtttacccccattttatgatagttagtagtaactaacatcagtctaatcaggcgctcaattgatgtcaacctgtttcaaaaaggataaaaaggagttatgatcatgaaaaatattttaatcgtcaattttccggcggaaggtcatgtcaatcctacattagggatcaccaaagcatttgctgacagaggcgacaatgtgcactatctttcaacagaaaagtataaagacaggctggagggcgtcggagctaccgttcatttatacaaagatctggtgagaaacgcgcatattgatccgaattcaccgtccggccttcttgaatttttaaaaattcatctcaaaacctcgctgtatattctagacattgtaaaagagctgtccaaaagcatttcgttcgatgtcgtgtattatgacacattcggtgcgggtgaattggtcagggattatttgaacattccgggaatcgcttcgtcggcttcatttctcttcggacaagaacatatgaagattctgccgttgcatccggattcaggcgcggagctgcacttggacaaagaatgtgaggacctgcttacggaactgaaagaaaagtacggcgtctcgcctaggcatacaggacagtttatgagcaatcaggcggagctgaccgttgtgtatacaagccggtattttcagcctgacagcggccgttttggggatgatgtgctgtttatcggcccgcgttttccaaagcgcctggacaagaccgattttccggtagaatcgttgaagaatgagaaagtcatttatatttcaatgggaaccgtacttggcaaaactgcggattttttcaatatgtgcattgatgctttccgtgatttcgacggcaaggttgtcatcgccgctggcgaaaaatcggactacgcggaaattaaagaagtgccggagcattttatcatcgccccgtatgtgccgcaattagaggtgcttaaagaggccgatgtgttcatcacgcacggcggcatgaacagcgtcaatgaaggcatccattaccgtgtcccgatggtcgtgcttccgcatgataaagatcagccgatgatcgcccagcgcttgaaagagctgaatgcgggatatcctctgtttgcagaagaagtgaatgctgaaagattgagagatgcagcagaacaagtgctcactgacggaaaatatcaggaaggtattcaaaaaattgatgaaagcttcagcaactgcatggacattaaagatgcattggcgcgtattgatgaatatacggcgcggaaaaagtcgctgcagccataacagaaagccgctactaagcggctttttttatgcataaacaccgcaaaaaagaaaaaaatagaatgaatcatagatcagaaaggatgttgcatgatgcgcaaactgtgcgtttgcctgcttctcgtcattccgctgtcatgtacggctgtcatgccctctgcctacggggaaacacgcgtttatcaagagttgacggacaagcagaaaaatgaactggcttctttgcaaaaggacattatggaaaagaaaaaacagctgatcaataagtatgtggagtacggaatacttgatcaggaaaggggaaaggaaatcaagtctcatattgaaaagcgctatgaaaaagagcgggaagacggatttttgccaaagtggaagcaccataaagaaaagtttcgcccgcatcacattcattaaactgaaaaagacggcgcctcattttcttcgtgacaaaagtgtaaagacaggtgtaaactaatactcatgtaaactgctaagagagtaaaagaggtgttgtgagtatgaagaaccgtcctgtttcagagcgcagactgcttggcatcgcaggcctcggctggctttttgatgccatggacgttggtatattatcgtttattatcgccgctttgcacgcggaatggaagttgacgccgcaggaaatgagctggatcggcagcgtcaactcaatcggcatggctgtcggggcatttgtctttggccttttggctgaccgcgtcggaagaaaatatgtttttattattacgctgctgtttttctcgatcggcagcgggttgtccgctttaacgacgacattgtgggcatttttagtgctgcgctttttcgtcggaatggggctcgggggagagcttccagtcgcatctacgctcgtatctgaaaccgttgcgcctgatcggaggggaagagtcgtcgtcctgctcgaaagtttctgggcattcggctggctggctgcagcgctcatttcgtattttattattccggcctacggctggcagattgctttattgataactgcgataccggctttttacgccttatatttgcggattgccctgccggattctccgaaatatgagaagcttgcgcaggaaaggaagccgaccatcatggaaaatgtgaaaagcgtctggtcccgcaaatatgcccggcctacggccatgctgtggatcgtctggttttgcgtcgtcttttcctactatggcatgtttctttggctgccgagcgtcatggtgatgaaaggattcagcatgatcaagagctttgagtacgtcctgattatgacgctggctcagctgcccggctatttctccgcggcatggctgattgaaaaagccggtcggaaaatggtgcttaccgtctacttgctggggacggctgtcagcgcctacttcttcggatcggctgaatcgctggcgcttttgcttgtgtcaggcatgtttttatcatttttcaaccttggtgcgtggggtgcgctttacgcttataccccggaacaatacccgacgtcaatcagggggaccggcgcaggaatggcagccggctttggccgaatcggcggcatcctgggcccgcttcttgtcggctatctcgtcgcccggggaacagagatttcaatgatctttttcatcttctgcatcgccgttgttgcggccgtcgcagccatcatctttttggggaccgagacgaagcagaaagagcttgcctaatgtctgaattctgcgtcataatagacggacgcgaaaatttggaaagagttgattgaattgaaaaagaaagccattatgaaaacattgagattgacagtatgggtttagaagggggaagaacggcccggctgcaaggaacgcgcaattgccacctgaatacgtagagaaggcgcttgtagcgccttctcttttttatatatgcaggatatataggtggtttgcactattgatgtccatggccgaagagaatagaatcatattaagaaccaatatcgccgggattgttactggtaaggcaggcaagacctaaaatgtgctaaaggaaccgcagcccttagtgtgcttttttgcgcctatcggctgatgctttcgcatgttttaggtctttttttgtttctttcgccagggggctttagacgtaatgacacatttttcattttgatcgtcttctgttgatttgataggatagaaaaattggaggaggtaggtgcgggtgcagcataaagagattgcaagagaactcttgcccctcattggaggcgcggagaatatcatcagcatcagccattgtacgacaaggctgcgcttcaatgtcagggatgaagaaaaaatcgatatagctgctattgaaaagatggagtctgtgcaggggacttttttcagatacggtttgttccagatcattttcggtacaggtgtggtcaataaaatttataaggaaatgatccaatacagcgatccggctccttttgaagaagcccgtcgggaggcgcggccgaacatgaacgtattgacgcgatttgccaaaaggctgtcagacatctttgtgccgatcattcctgcaatcgttgcgagcggattgctcatgggtctcattagtgtgcttaaagaattcagcctcggcgcttatggcggcccgctgatgaaaatgctcgacattttttcaagctcagcgtttgtcattttgcctgtgctgatcgggttcagtgcggctaaacagtttggagccaatccatttttaggcgccgtcatcggcggtattttgacccatcctgatttgctcgatccttcaatgctcggcagccaaaagccggaatccatcgaagtattcggccttgaagtccctttgatcggataccaggggacagtcattccgattctcttatccgtctacatgatgagcaaaatcgaaaaattcttgaaaagaatcgtccccagttctttagatttgatcgttgccccgtttattacagtcatggcttccgggtttgccgcgctgtttatcatgggcccgctctcactgatgatcgcccatttcataagcgactgtctcgggtttgtttatcattttgcgggggcgtgcgccggatttttatttggcgggctttacgccttactcgttttgagcggccttcaccacagtttttatgtgattgaagcgtcgctgctcgcagatcccgaatacggggtcaattttctgcttccaatatggtcgatggccaatgtcgcgcagggaggagcgggactcgccgtatttttgaaaacaaagaatgccggcatcagaaagattgcgattccggcttctctcacggcctttttgggaatcgtcgaaccggtcatgtttggcgtcaacctgaaactcgtcaggccgtttatcggcgcatcgatcggaggcgcactcggaggtgcatacgccgtcttcacacacgtggcggcaaattcttacggattgtccggcatcccgatgatttcaattattctccctcttggcaccgccaatctcattcattatttaatcgcttttgcgattgcggtgatttcagcattcattgcgactttgtgtcttggctttaaagatgaaaaagaataattccgttttcattcattaaaacaggatgaaaggaaggcagctatgaaagtaaaaaaaatcttaaacaacaatgcgctcgtcgtaaaggatcgcggcgaggaaaagatcgtattagggtccggaatcgcatttcaaaaaaagaagaatgatattgtcgacagatctaaaattgaaaaaatattcgtgatgaaagattcatcagaataccgccaattcgaggagatcttaaaaacattgccggaagatcatattcaggtggcggaggatattatttcttatgcggaaaaagagctcgggatcaaaatcaatgagcgaatccatgtcgccttttcagatcatttatccttcgcgatagaacggttaagcaagggaatggtcattaaaaatccgctgcttcaagaagtcaaagtcctctacacgaaagaatttcaaatcggccgctgggcaaaggctctcattaaagaaaagctgaagatcgatatccccgaggatgaagtcgccaatattgcgctgcatatccacacagccaaaacaaacgcgggagatatgacaaaaacgctcgatctcacaacgatgatcaaggatattatcgagatcatcgaaaacaaactcaacattaaaataaaggatgagacgatttcgtatgagcggcttgtcaaccatctccgtttcgccattcagcatatcgagtcgggagagacattttacgaaatggatggtgagatgatcagcctcattaaaaagaagtttggacaagcgtttatgtgcgcagaagaaatcggggcatttgtgaagcgggagtatggctttgaatttccggaaaaagagctgtgctacattaccatgcatattcagagattttatcagcggtctgctgtcgtgtaaagatgcctgcgtttaagacaaaacggagccctgttaacgggctccgtttttgtttaaagcttcaacttccgttaaaaccgatttatcgattagaaatcctttcactttgacgtgcaaagggattaacgggtgcctgcggatggcggcgacgcttttttgtacaccttcggccacgttttcgctcggtgacagccattcatcaatgctgccttgcgtaaattccggactgcagttttggaaaaggtactctaaagtttgcattctatcttttaaatctttgtctctatttaaaaggtcagaaatatcttcatctgccgatggttcgtatttgtcgcggacaatccagatttcttccgctttgttccggtggacaagggtgatgatatccctcatgaaatcaccgtagggctgtgaaatatcagggaagacgctttttaaaacgagggcgtcctccggctgaatatttgctgcccggcagatggtctgttcaagctgtttctccattccgataatcatgagtatttttttgttttcttccatgacatttcacctcattcatttatcgtgtttgtccagttcttccattttccctccggattaatagatgccagatgaatccatccgttctccgccttttgccggaagctgtgatcgcggtcaaggagccgttcgatatcatcatccggcgcttcaatcacgatcagcagcctgagaggcgcatgatagatttcgtcatctgaccgcatgacggactgccatgggagaccggccaaaagatcgcttgcatttccttgcataacgccgagaccggcagtgacggtttgagttgctttatttccgcttccataataatgcggtgcaacggttgacgcgtaatactgcagattgatccattgggccactgttccaggccctgaaatgatgccgctaaggatggagccgtcctcgtcattccgccagtcatagctgtgcagaaaagcccttccctcaaggtcggccccccgtgtaagccggcgtgtgccgatgatgaatgaggcatttcgggccagcccccattcgggacggatttcgctccaatcttcggcgaagcgctcaacttcattccgcggattttgatagccgagctgcggcagctcttctaagcgttcggctccgacagtacggctcacatcgggaagcacagagttgatgcggtcaaacgcttgttgagctttagccggcagctcaggtacatagagccagtgcagttcatccaaagttgtaatgtgctctgcggcagcgaataccgtatcatccggaataaaaatgccgtcggagcgaagcctctgtctgacgcttggaagattgcataaagcggctaggacgcgtgcgttgaaagcgcctgaggcgcccccgcaggcgccgcagtccagtgcagaggcataagggttattcgtgcttctgctgccgtgcccgcaaatgacaaccagcggagcgaaccggtctgtgatgcccatcatcttcaatgcctgtctggcataagcggctttttcttcttccgtaaatccgactggaatgccggcttcagatgtttccatgcgatcaagcgagagctttgtctgaggcttcttcagccatgttttccgcgcatttctgaatgcttgcccggctgcgcgggggacaaggctgcgcgcggccatttgcaggctcagccaaggcccgctcacttcgggaagcagcatgcccgccaatagattctgtttcatcgttttaaaggcggagctcagtgaggctgccgcttttttatgttcttgatacgacttaaagggtaattcttcggccgtttcttctactcgatgctgcggttttaggatgaccggcagagagctgtggctgtgtttagtgcctagttcgcacgtttcgattgccatattgaaaaagcccgctgttccatatgtttcaaaagggcctgacttttccaatgccctgcggaacggctctgaacggacgtcaatacaaaatgcgaattgggccagcaccgtttcgcttttgtcagcagcggcaggtttgtttgccgtgatgagcttccttacctcagcggcgtatgtttgttcccaagcttccagccagagacgcctgcgcgttatatcatcaaagcggcgggcgagtgttaatctcgctttttgctctgctgcggaaagttcgagccattcttcaggcgtaaggccgccccaatgcagccaggacgcaatcaaaggaacgagctgcatctctttttcaggattcggcttaggcatcggtaaataaggctcaacaagcatccattccattgaaagccggacagccaaatactcgagcagcagttcttcttcgtcctgcgattgctgagaacgccaaagcatcatcccggcccatcccggcagagaaagcagatgagcttcaaggtatgcctgaacgtctacattggaaatatcaaacgctcggagcgcttttttcatagcgtcccgcggctcttccggccatccattcaggcgttggcgttctgcgcgcgacagagcgggatcatgttcaacaagctgccgccatgcgctgtaaaaccctttctcacgatgcggaagccgccatgccgattgtgattcatcaaggaacagcttgcaccatttaatcacatgatggtcaaggaggtgagcacttttctgtccggcaaaaacgctgagcggtttgataaagcttgtttttcggccatcgattgtcccgcgggccgcttgtttggcaagctttttcacttgccgggatctcaagagctgtccaggtatttcgtccagcttgagggcggctttgcaaaatgcctccgctgtttccctctgcatgccgggctgatgtgaatcgagccaattgatcagctttttttcaagaatcgtctcaacgatttctccccgttgttttgcggaacggaaaatggaggactttgggtagatatcaacatgaagctgctgtttaagctgccgggccgtctgttcaaatgtttgttcttcaaggcccatccacggatgacgagcggcaaaggtttcaatcggccaaagcggcgcgatgacccgtgctgctgattgaaccaactcatccatattaaagtccgcagtctgatgttcatattggaatatcaattgtttagacaatgtgggtgctgctttcatgattggcgacctccctgagtaagatattggtcaagataattcggccgttcttcgaccgattcgaaatggggttcacccgttttcacaagacgtaaataaagtgcgccggaccatgcaaagcgctgccgaacgatcaacgcgccggccgcactgccggctaacaaaacgactgccgtcaaaacggccgccattgcaggcggctcagccccctgtacaacagcatccttcaggagcccgtgtaaaacggaatgaatgatggcaaacgcgagtgaagcccctgttaaaatgaaaagtccggcaattcgtgtgacgcgtccgtaattggctgtgacaagctgcctccaagcaatgaacagtgcccagcctaaaacaagggcgctgatcaattgatagccatcgtccgcagctgaggcccagattccgatgacgagagcaagagcaaagacgccgcctatcatgttccaaaaaagagccggtctgcccggtttagatgcgaacgattcataacggcgcaccgctgatccggcttgcaggaaaagggcggctttgaacaggccgtgcaaaatgaggtgaataacagccgcaatataggcccctaatgcgcattggacgagcataaaacccatctgcgcgaccgttgaagctgcgagctgccgcttgtagtccgtttggacgatcatcatgcccgttccgagcaagacggaaaggacggcgggtacaagcagaataagctgcagtacatcaccgctgaacatcggtgcaaaacgagtcagcatgacgccgcctacatttacaagtccggcgtgcatgactgcggaaacgggagtcggagcgattgctgaatcgagcagccaacgatgaaacggccactgtgccgcaggaatcatcaccgttaaaatgacgaggaggccgatcccggttttctcccatgagctgagctgtacaaggctttcttccgctatggcggatgataatcgccagtgtcccgtcgaaagagacagccaaagagcggcagctgctatcgccagccagctgagcgcaaagatccggcccgcatacaaagcggcatttttcgccgcctgccacgcgctgtttaagccgattagcgcagtcaagccgagcagcgtgatcccccagcataaaaggagccagcgaagatcatcgttcagccaggcgcatgaagctcctcctgtcgtaagcgtcagcagcacaaaaaatttacggtaggagcggtcgccgaataaataccggacagagtagcgctggacgatgaagccgatagtcaagacaaacaaggcgatcagccaagcaagcgaatccaagcgccaagaagcttcagcctgcccgggatttgccgttatcaatgctgccagcgcggcaagcggaggcagggcgatgattttggcatgaatccgtacatatgccaatggaacctttcgattcaggacgagcagtgcgctgaacatacaaagcgcaagcgacgcgaaaaatattttcagccaaaataaagaatctagcatatcaaacatccggcatccctccgtcgggatgatggaatagaacatactgtttcatatcttgccttcctttctgaaaacgtaaaaaaagccggtatattcaggactggcctatttcagccaatctttctgaatgataccggcttatctttaactcatgttcatgctttaaagatcttccgtttttctatgacaattttttttgcaggtcgtttgccaatttaaacaccataatccgttcgcctgtgcgcgtgctgatatccgtatgaaagctgatcgtctcttcaccggtcagcttcttcatcatgcggctcagctgctctatacccgattccaccaaaccggagcgggttcttttaattgacagcaggccttcttttgtactgcaaagttcgtattcggcgggcgtcaaaataccgttcagggaaacgatgaccatatttcttataatatctgttttaacagatacggatccgcgtcccaaatagtctttttcccattgggttaaggctttgcttatctccgcctccaaagaccccttcgtcactttctgtttttccaatgctatatcctcctgaaaaacggtatatttcttttccttatacaagagaatagggaaaatgaaatataccgtcctatcaaaatgttaatgtcatgcatggtaaaggttgctttttcatgcgaccataatgggattatagccgaatgctaaagctcttttgcatgagattacgattattgattttacggaattactttttaaatatcatatcttttaagatttatgatgtcaataccgttcttttattggataaaaaagaggaatgccgtcttagcagacgagcattcccttggcgactgcaccggctttttccttgccgttcagcagttcggcaagcttgagggcaaacgggatcgtggtcgccggccctctggaagtaatgatatttccatcaacgacgacgttttcatgtgcggtgacatccgcccctgttaaatgttcttcaactcccggatagcaggtcgctttttttccgctgacaagccccgtttttccgagcgtcatcgttgccgcacaaatggcggcaacatattttcctgcatttgccgcttctgtcagcgtcttatgcagagcttgatgctccagcatttttttgctgcctacatttccgcccggaagaatcagcatatccgcttcttgccaatcagcatcgtcaaacatgacgtctgcctcgacgacaatgtcatgtccgcctttcacgctgcgcgatggatcaagcgagacggtgacggtctcaacttctgcccttcgtaaaacatcaattgttgctatcgcttcaatttcttcgaatccgtcgattaaaaaaacatacgctttcttcatgaaaaaacctccttcgtctctaccgttcattctaaccgcggcaacgacatttccgcaactgacgaagtagacaaattgagacacctgtctcgttttgtctcttgttctgaaaggatgtccgcctgaaaagcggcttatgttcgcttcggagagctggcacgatttttgcatcataacgtgtgagtaaaaaagacaggaggttttttcatatggaagaggcactgacaaaggaaaaagcagtgtggatgtatcaaaaaatgctggaaatccgctatttcgaagatcaggttcatcagctgtttgctaaaggaatactgccgggttttgtccatctttacgccggagaagaagcggtcgctgcgggcgtctgcgctcatctgaatgatgaagacaccatcacgagcacacatcgcggccatgggcactgcattgcaaaagggtgcgacttgaaaggcatgatggccgagatatacggaaaatctgcaggactttgtaaaggaaaaggcggatcgatgcatattgcagactttgacaaagggatgctaggcgcaaacggaatcgtcggcgggggatttcctttggcctgcggagcagctctcactgcaaagtataaaaagactaaaaatgtaagcgtttgcttttttggcgacggcgccaacaaccaggggacatttcacgaagggatcaaccttgccgccatctggaagctccctgtcatatttgtcgccgaaaacaacgggtatggcgaagcgactccgttttcctatgcgtcaagctgcgagtcgatcgcagatcgtgcggccgcttatgggattccgggcgttcgcgttgatggaaaagatgcggccgcggtcttccaggctgcgggccgggcgatagagcgtgccaaaaacggagaaggaccgacgctcattgagtgtatgacataccggaactacggccattttgaaggagatgcccagcgctacaaaacaaatgaagaaaaagcggtgcatcaggaagaaaaagatgccattgccgtgttcaaaagcgaactgctggcaaaagggctgatgagtgaagaagagcagtcgcggattgaaaaagaagttgaagaagcggtcgaggaagcggtcgcattcagcgaaaaaagcgcttatccggaagaaaccgaactgctgacggatgtatatgtatcctattaattcatgaagggggaaggaaacatgacgagggaaatcagcatgtcagccgcattgaatgaagcgatcaaacttgcgatgagaagggacgatcacgtcattttaatgggggaagatgtcgcaggaggagcgaatgtcgatcatctgcaggatgatgaagcatggggcggtgtgctcggcgtcacgaaagggattgttcaggaatttggacgggagcgcgtccttgatacgccgatcagtgaagcggggtacatcggcgcagccatggctgctgcttcaaccggtttaaggccgatcgcggaattgatgtttaacgattttatcggaacatgtttggaccaggtgctgaaccagggagcgaaattccgctacatgtttggcggcaaagcggaagttccgattacgatccggacgacccacggcgccggctttagggcggccgcccagcattcgcaaagcttgtatgccctatttacaagcattcccggactgaaagtgattgtgccgtcgaccccgtacgacgcaaaaggattattgctcgctgcgattgaagatcaggacccggttatcttttttgaagacaaaacgctgtacaacatgacaggcgatgtgccggaagaatattacacgcttccaatcggaaaagcagatatcaagcggaaaggcgccgatgtaacgattgttgcaatcggcaaacaggttcatacggcgcttcaagcggcggaacagctctcagcgcggggaatcgaagccgaaatccttgatccgcgaagcctttcgccgcttgatgaagaggccgtccttgcatccgtagaaaaaacaaacaggcttgtgatcgtcgatgaggccaatccgagatgcagcatcgccgcggatatcgcatcattggcggcagataaaggatttgattcgcttgacgcaccggttaaaaaggtgacggctccgcatacgccggtgccattttcaccgcctcttgaagacctgtatttgccgacgccggaaaaagtcgtgaacaccgtgcttgagatgctcggagaaacatcaacacatacggtgtaaagattggaaaggagaggagaacatggctgtcgaagtggtcatgccgaaattggggatgtcgatgaaagaaggtacggtttccgtctggaataaaaaagtcggggaagccgttgaaaaaggagaaagcattgccagcataaattccgaaaaaatcgaaatggaaatcgaatctccggcaaacggaaccgtgttggacatccaagtatccgaaggagagggagtgccgccgggaaccgtcatctgccgcatcggaaatgaaaacgaacaaacgcaggagagccaaacaaaacagccggatcccacgaaagaacggattaaaatttctccggctgcgcgcaaaattgcgcaaagcgcaaatatagacattaaaacgctgaagggcacaggccccggggggagaattacgaaagcggatgtgttgcaggcgcttcccggccggccgaacaagcaggcggctaaggctgaagctgaagagcggccgccggcaagcccgatgaggaaaacgatagccgcaagaatgacggaaagcctgcaaaacagcgcccagctgacgattacgatgaaggcggacatcacgaaattaacagtcctgcaaaaacagcttaatgaaaccgctcaatcaagatacgatacgaagctgacgatcactgattttgccgccagggcagctgttttttcgcttttggatcatccggccatgaacagtgtttatcaagacggaaggcttgcgacctttgagcatgttcatttaggagtggcggccgctttggacgaaggcctggccgttcccgtcatccgccatgccgagcggctcccgctgatcgaattggccaagaaaatcaaatggtacgccaaaaaagcgcgggaaggccggcttctacacgatgaaatagaaggatcgacatttacgattacaaacctcggcgcatatggtgtcgagcactttaccccgatcttgaatccgccggaaaccgggatactcggagtcggccaaatgtattcggcacccgtttatcaagacggagaactgacaaagggcgccattctgccgctcagtctgacttttgatcaccgcgcgcttgatggtgcgcctgctgcagcattcctttcagatgtgaaaaactatttggaagatccggcatcaattcttttatagagagaaggtggatagactgtgacacttgcaattataggagggggacctgcgggttacgtggcggcgattacagcggccaaaaatagcagagaagtcatcctgattgaagatggttccctcggaggaacgtgtttaaatgaaggatgcataccgaccaaagcgcttcttgaaagcgcagatatgttcgagaaaataaaatccgccggcgcattcggaatcgggctgtcaggcgaaagcccgacggttcagtgggaggccgtccaaagccgtaagagagagatcattcagcggctcgccgggggtattgaatatttgatgaataaaaataaaatcaaggttctgcaaggaaaagcatcgtttttgtccgaacacgacatacttgttgaaaaggacggaaaacaggaggtcatcaatgccgggcatgtgattatagcggcaggggcagcacctgccgcactgccttttgcgtcttttgacgggagctggatcatccacagcggagatgccatgtcattgccgtccatccctgaaacgatttttattatcggcggaggaatcatcggctgtgaatttgccagtatatacagcaggctgggagcgaatgtgatcatagccgagcaggcggaacagattctgcctgaggaagatccggatattgccgcctttcttcgcacaagtctcgaggagtccggcgtccgtgttttcacatctgtacaagtggagcgtcttgatcctgccaggcagcgcgtctttctgaaaaatggcgatgacagctttaatattcaagctgatcgatgtctcgtcgccgtcggccgaaagccgaggactgatgatctgaagcttgaccatatcggagtccaatatgacaggaaagggattcatgtcaaccagcatatgcagacaaacatcccgcatatttatgcgtgcggggatatcacaggcggggttcagctggcgcatgccgcttttcacgaaggaaccgtcgccgcatcccatgcctcaggcagagacatgaaggtcaacagtgacattattccgcgctgcatctatacttcgcctgaaatcgcaagcgtcggcttaaatgaaaaaaaggcgagggagcgctacagggatgttcgtatcggagagtttccgttttcttcaaacggaaaagcgcttattttgaatgaaactgccggcaaggtcaaaatcatcatagagccggagtatcaggaaattgtcggggtttcgatcgtgggtccgggagcaaccgaactgatcggccaggcagccgtaatgttgcatgcagagctgacggcagacgcaatggagcacttcatcgcggcccatccgactctttcggaaacgattcacgaagctttgctgcaagccgcaggtcgggccattcactgctgaataagggagaacttcgcatagcgtgagagtgcggagttttttttatcgatattgaaagcgcttttataatataatgaggaaaaagcatgaggagaggatggaatgaatccgacgccctgctatttaaatacgtggaaacgctttgttcaggaagggcttcttgatcaggcccgcttgaacaaaagagtcatggaatcatggtaccgctgcaaaaatcgaaatgtcaatccgtatttagataaaggacagtcaattttaaaaaaggatttattcgacgctcaaaaaaagaaacactcgttattcctcgatatcgccctgccttatctacacaatatcagccgtgaattaaaagagtcggaaatgatggcgctcctgatcgatgccgacgggtacgtattaagcttggccggctgccggaggacgcttgaagaggcgaaaaaaatcaattttgtcgagggcgtgcgctggacggaaacagaagtcggcacgaacgccatcggaaccgcacttgaaatcggcgaagctgtcaccattcacgggaccgagcatttttcggtcgcttcccaccattggagctgttctgctgcaccgattcgcgatgaagacggcaccgttatgggtttaatcgatatttcctgcctcacggatagaaggcatccctttatgcttgggatggctgccactgccgcacacgccatcgaacgcgagatcagcgcacatacgaaaaaaaacgaagccgagctcatcagccattgtcttgaaaaaatcgattcggatcagccgtttatcgtctgcaatgaaaaagacaaaatcgtagccgcgagcagaccggtgcgggaacgtttttccgactggaggagaatggatgtcaatgatctgtatgagcgcgggtttgccggggggcacaagcagacaattttctccgccaaagacgggaggcccctcggtaagtcgattgcactggctgaagtgtcccgcaataaaacagctccatcactcgtatcccgtttcatctatccgggtgaaacaggaacaagccgggcgtttcagcaggcgcttcaccacatgaggcttgcggctaagacggatgcgaatgtatacatatggggggaaacaggctccggaaaggaacttgccgcgagggccattcatcaggcgagcgcacggagaaacggcccttttatcgccgtcaactgcggcgccattcctgaaagcttgatggagagcgaattgttcggctatgccgaaggcgcatttacaggagcaaagcgccgcggttcaaaagggaagtttgaacaggctcaccgcggtacgatttttctcgatgaaatcggtgagatcccttatcagatgcaagtggcgctcttaaggatcatcgaagagcggaaggtcactccgatcggcggaacccgtgaagttcccctcgacatcagaatcatcacagcaacacaccgtgatctgaaagaccttctccaaaaaggaaagatacgtgaagatctgtattaccgccttcatgtttaccccgtaaaaataccgccgctcagagagcgcaaagaggacatacctgatttgttccgccactatcaacaacaacacgagtggaaggccgagtttccgccgaattttttcaagcggcttcaggaatatcattggcctggtaacatccgtgagctctttaatacatttgaaaggctcagggttttatttccggaaggcggactgatcgatccgtcccaatacagcgcggtgctggacggactcgattggaacagcggcgcaccttctgaagaagaccggctcacattcagagaacgtgttcaaaaacaaacgatgatggaagctttgcaaaaaacgaaaggaaatgtgtccgaagcggccaagctggccggaattccaagaagcacattttacaagcggcttcgaaaatataacctttagcctctcggcgcccaaagcatgacgctgacgccggctaaacagatcacagccccggcccaatcatagaggtcgggggtttttttgtcgaccagccacccccaaagcacagccagaataataaatacgcccccgtacgcggcatagacgcgcccgaacgatggaaatgcctgaaaagccgggatgacgccgtaaatgattaaagtcagccctccggccaacccgtaccacaatggtttggattccctcagccacagccatacgagatagccgcccgcgatttcagccaaacccgccagtaaaaataaaccgattgcgatcatcatcaacaacacactccaattcacgtgaattgtctctattctacacgacataaaacggccgggaaagttcccgtttttcgggaaaataaacagaacgcgagtataggaactgtctcccccgaacctgttggaacggctccttcagcatgatataagtaaattgtaaacgcttataagggggctttaaaaatggataaaacgtattcaattgtcattgcaggcggaggaagcacatttaccccggggattgtattgatgctcttggacaatctggatgatttcccgatccgacagctgaaattgtatgacaatgatggagagcggcaagacaaaatagccggcgcctgtgaagtgttggttaaagaaagagctccgcatattcaatttttagcgacgaccgatccggaagaggcgttttccgatgttgatttcgtcatggctcatatcagagtcggtaaatatgcaatgcgtgagctcgatgaaaagatccctctgaaatacggagtcgtcggccaggagacgtgcggacccggagggattgcgtacggaatgaggtcgattggcggcgtgcttgaaatcattgattatatggaaacctattcgcctgacgcgtggatgctgaactattcaaacccggctgcaatcgtcgccgaagcgacaagaaggctgcggccgacatcaaaagtgctgaacatttgcgatatgccgatcggtatcgaagacaggatggctcagattctcggactgtcttcgcggaaggagatggttgtccgctattacggccttaatcattttggctggtggacgtcaatttgtgataaagacggcaacgatctgatgccggcgatcaaagagcatgtcaggaggttcggctatattccggaacaggagcatgaaaaggctgaggcgagctggaatgacacgttcaaaaaagcgcgggaagtatttgaactcgatcctgagacgcttccaaatacgtatttgcaatattatttttatcctgatgatatggtgaaaaaatcaaaccctgaatttacccgggcgaacgaagtaatggaagggcgggagaaattcattttcggcgagtgtgaaaaaatcgcaaaagcccaatcgagcgccggcagcaaaatcgaaattgatgatcatgcttcatatattgtcgaccttgcgcgcgcccttgcattcaataccggtgaacggatgcttttaatcgttgaaaataacggagcgatccaaaacttcgattcatcggcgatggtagaggtgccttgcattgtcggcaagaacggtccggagccgatcacaatcggcaaaataccgcagttccaaaaagggctgatggaacagcaggtgtcggttgaaaagcttgtcgttgaagcctggattgaaaaatcgtatcaaaagctttggcaggctctgattttgtcgcggactgtgccgaatgcacgaacagccaaactgattctcgatgatctgattgaagcgaacaaaggctattggccggagctctccgcggaaaatcttcagccgtcgctttaaggatgaaagcgcctggggctcctgagccagaccgccagcccaggcatatccccccatttattctcgtattttatataatagagacagagaataaatggggtgaaaatgatgcagttggaagaattaatgaacaagcattataaaaaattgaacgaaaacgattttcatgttttgaaatatattttgaaccatcaagacacttgctacaagctgggcatcaacgaattagcaaagaagtgcaatgtatcccgcacatcgattttaagactttctcaaaaactggatttcagcgggtacagcgagttcagggtgtttctgaagtgggaggccgagaagcgggaagaagagcgggaagattgccgttcctttgaaagcctcatgagggatatggaagcgagcatgaaatatttgaaaaatacggatttgcgaaagatgtgccagctcattgacgaagcggaccggatttttgtctatggttcaggcacggctcagacgacgtgcgcttatgagctgcagcgaatgtttgtttctcagcaccgttatttgacggtgatcaaagatcaaatcgatttcgacctcatgtttcctgattttagcacggccgatctgatcatcatcatttcgctgtcaggagaaaccccgtcgctgattccgcaggcacagtctttgtcggctaaaggcattccttttatctctttgacgaatttgaaaaataatctgctcgcccagctcactccttacaatctctatgcgccgagccagacggtgacggtttatccaaaaacagagctgaccgcttttgcacccttttttctcgttggggaagcgctgtttcgcagctatgtcgactatgctgaagaaaagaaaaatcaggagtaacaggggggattcgcattgatgcaaaaagtacagcggttcggaagcgccatgtttgtgccggttttgctatttgcttttgccgggatcgtcgtgggcctcagcacattatttaagaatgagcagctgatgggatcgcttgccagtcaggataccttttggtatcaattctggtatatccttgaggaaggcggctggaccgttttcaggcaaatgccgctgttgtttgcggtcggaattccgatcgcactggcaaaaaaagcgcaagcgcgggcatgtttggaagcgcttactacttatttgaccttcaattattttgtcagcgctattttgactgtatggggcgactttttcggagttgatatgactcaggaagcaggaggaacaagcgggcttgcagaaattgccggcatcaaaacccttgatacgaacattatcggggcgattctgatttcatcgattgtcgtttatatccacaaccgctattttgataagaagctgcccgattttttagggatttttcaaggctcttcattcgtcgtcattatttcatttgcgattatgcttccggtagcactggcaaccgcgtggatttggccgatggtgcaggacggcattgcgtcgctgcaaagcttccttgtcgcctcaggtgctttcggtgtatgggtttacacatttttagaaagaattttgatccctacgggcctgcatcacttcatatacacgccatttgttttcggcccggccgtagttgaaggcgggattgtcacctattgggcgcagcatctcagcgagttttcagcaagctctgaaccgttgaaagagctctttcctcaaggcggattcgcgctccacggaaactccaaaatcttcggaattctggggatcgcactagccatctatgtaacagccaaaaaagaaaagaaaaaaatcgttgccggtctgctgattccgatcacgctgacagcggtaattgcggggatcacggagccgattgaatttacgtttttgttcatttcgccgctgctgtttttcgtacacagcctcttggccgcgacgatggcaaccttgatgtatgctgcaggggtggtcggaaatatgggcggcggtttaatcgagattttaacgctcaactggatccctctgtttcatcagcacggcagcacttatgtttttcaaattttgatcggcttgtctttcaccgccatttacttcttcgtattcaggttcttgattttaaaattggatattgccacgccggggcgtgaaaaagaccagcagcaggagacaaaattttattcgaaaaaagattacaaggcgaaaaaagaatccgaaaaagaggtttctgcggcgcaggaaattgctgagaccgatcaggcggttctttgcatcaaagcgctcggcggaaaagaaaacattgcggaggtgacaaactgcgcgacaagactgagagtcagcgtgtatgacgagtcaaaagtggagccggacagtacgtttaagtcctttggcgttcacggtgtcgtcagaaacggaaaagccttgcaaattattatcggtctttcggttccgcaagtccgtgaaagggtcgagaagctgctgaaccaatcataattgcgccggtgcaaatggcatctcctgaaatgacacatgcaagctgcagagacttgcatgtgcgattgggggatgctcttttaatgcaaagacaagctaacgcttcacaggttatccacattagctcgctctatgccgatgtttacctttttttacaattcagcacgtaaatttcattcttcagccgttcagatgttttaatgacaactttttcggtgccctgaaaatccaaaatgccgtcgtatctttcgatgacttcgtcaatatgtttgaagtggcggacgtgggcgcgtgaatcatagttaggcacagaaatcaccatgtcgctcccttgaggaagactcgataaaaacgctttgtctttctctatatgctctaacacttccagcaaaacaaaaacatgatatttttgcagcatccggacgatcgcctcgtcatatacatttccttcgatgaaagtaaacgagggattataccttttggcttcttcaagcattcctttggaaaaatcgatgcctaaatattttctgtatcctttgtcatataaaagctttgcgaatctcccagtgccgcagccgatatcgacaatcgtttcatctttggactccggcaataaacgtgcagcttcttcatacacctttctccacgggcttttttcaagcggaatcagatgtcggtcaataaattgatcataaaattcagctggcatttccgttcccatgtttttcacctcgaaatcttttaaatcatcagtaatagaaatatatgtccggaaagaaaatgcgtgcgggaagaatccagccgataagaaaaatagatctattcatcattgttcctgctgctctaaaaaatctattattgtgtctactatttcttgtgcacgcgcatgataggtatgctgtgaatgaacgagacggtagccgttgtctgtgatacgctgcctttcttttttattttgaagatagtattttgctttgtcataaaagtcttcaacttcacaagcaatgaaatgggtgccgtctttaaagccaagatcgaaaatatcttgatttggctccgccagcaacagcgttctgcaggcaggggcttcataaaattttaacaacgggtagcggagggcgcttccgcatgtgaaaaatatctttgctctgttcaattcctgggcatatttttcattcaaaaaagcctgcttgatttcttcttcgtcagttatgacattgccgggatgggggtggtgaacaaacccttcttcatgcttcatggtctgcaatacagcctccctaaaaaggtattttccttttgggggatatcttttgtttccttcatgtacaagccccatgagcaaatagtctatcgttttcttcaacttccagtccttgaatatttctggatcaactgcccatggaacccatctgaatttgtctttgtactgggggtattcatttaaaaaatgctcttttgtcactgaaaaaattaaatcaatttggttgtcttcgaaatagctgcttctgatctgtttattaaaatgagaatcgatcacaaacgcgccggtggggatgtttgtatctttgagccccctaatgtttggggacaatgagaagccgtaggcaatgtcgtagtggaaaatgaaatcaggacgaaattggattttgtccaatatatccggaagatagccgtccgtatgccagtacatgacttcggcaaactcctcaagagatttcatcattttatactttacttcatgtttgggcatggtcttccaaaacgttttaatcagaactaatattttcaagcatctccgcatttctttctcctctcaagacatcttcgtcatctttccctatttaatatatgaggattaaaaattgatgttcaggcaagcgttaaaaagacggggggctgggggcagcttgaaaatatgcggaattaatcagcaaaacaaaaaggcgatgcacctgagatgcacgccttttttaatgattttcccgttcattggcttcgtccagatcgatccattcctgcgaccatttttccattcctttaaggaccggttcgagcgcctgccctttttcagtcagggagtattcgatccgcaccggagtttctggatacacatgccggtggatgatgccctcgtgttcgagttcttttaatctttcggataacagccttccgctgatgggaagggaagattctatatggcaaaaccgctgcgggccgttaagaagctggtgaatgatgaatccgttccagcgctgacttatcattttcattcctttttcaaatttcggacataaagatgataggctcatgttcctcacctctctaggtctattataacggtatatcaatgaatgagcaaagctcataaaatgtcttgacgtaagtttgttatttatatatactaacttacacaaagtaagtaacgaacgaaaaaaggaggacactgcagacttattcaaggggatatgttgatagatggataaagttggcgttcgtcattggtctttaaaataaaaattgaacaagaggagaaaataatgagcaacaaatacgaattaggtgcattaattttacgtttggttacaggtcttacatttttgcttcacgggctttcaaaatttcaaggcgggattgaaaatactgtaggattcttcagcagtgtcggaattccgggctttctcgcctatatcgtagcgattatcgaattggccggaggggctttgatgattctcgggctcggtacacgtgtgattggccttttatttgcgattgtcatgctgggggccattttcactgttaagctctccgccggtttcatgggaacggatggaggcgcaggctatgaatttgacgttacgcttcttgcaatgtctgtatacttggccttgagcggaagcagcatgctgtcccttggggaaatgatcctgaaatcaaggaaagaaggaaaaacagatgacgcagcaaatccacccgggcactgagctcggatatgtcaagctgaaggtgagccgtcttgaaagatcggtttctttttacagggatgtgatcggttttcaagtattaaaacaggacggcaaaacggcggagttcacagttgacggaaaaaatccgcttttgatcattgaggagattccaaatgctgttgttcttcctgaacgatcggcagcaggcctttatcattttgccattttgcttccaaaccgaaagcagctcggcatggctgtgaagcatttgatccgcgccggcattgaactcggccagggagatcaccttgtcagcgaggcgttttacttgtcagatcctgatcaaaatggaatcgaaatctaccgcgaccgtccgcgagagggatggaagcgcgatgagcaggggaactacgtgatgggtacggagccggttgatgtccaaggacttctggaagaagccgatggccacgaatggcaaggtcttcccccggaaacaaaaatcggacacgtccattttcacgtccgggatttgaagcaggcgaaagaattttaccactctgtactgggatttgatatcacaggagattatcaacacatgtcagcgctttttgtctctgccggaggctaccatcatcatatcggcttaaacatctgggccggacagcatgcgccatttgccccgcttgatgcggcaggcatggcgtattacacggttcttttaccgaatcgagcggaacttgaccgaattgcaaaaaaactgaaaagctcgggttatgccgttgagcatgaagaaaacgcatggtttgttaaagacccggcatcaggtattgatatcagattgaccgtttgaaaaggcgaaactccagtttcgcctttttttatgccattcaatcaaaggacaacaaaagcaaagaatgagaagaaacagacattaataacaaagattcaggggcagcagctatgctaacatgaatttgaaaatctggaaatgaggggtgaaggttgatggcaaaaagcctgactggcaaggcgaaacatcatccgcctgtctggaatccgaacattgacggcgggcggttttgcaatcccgttcttttcatggactactcagatccggatgtcattcggaaaggcagcgacttttttatggcggcttcaagtttttcctgttttcccggaattcccattttgcactcgacagatttggtgaactggtcattgatcagccatgtgtttgacgagctccccttcggcgaatatgaggcccctgctcatggcaaaggagcgtgggcgccgagcattcgataccataacggagaattctgggtgtatttcgcaacgcctgatgaaggaatcttcatgagcaaaacatcagatccgtttaaaggatgggagcctctcatacaggtcaaaaagacaaagggctggattgatccttgtccattttgggatgacgatggaaatgcctatctgatccatgcttacgcaaacagcagaatcgggatcaagagcaagctgaatctttgccgaatgaaaaaagacggaacggctttggaagacgatggagaaatcgtctttgacggcacgctgaaccaccctacgattgaaggaccgaaattgtataaaaaagacggctattattatatctttgctccggcgggaggggtgaagacaggctggcagacggttttgcggagcaagcagatttacggtccctatgaagacaaggttgtccttcaccaaggaaatacggtcattaacggtccgcaccagggaggctgggttgaacttgattccggagagtcatggtttatccactttcaagatcgcggagcattcggcagagttgtgcaacttcaacctgtccgctggttcgacggctggccgctgatgggtgaagacataaacggcgacgggatcggagaaccggttttgcattgggaaaagccgaagacgggcgccaaagaagtgaaactgccctttgatcatggcaatgatgatttttcttcttcagaccgccttgcgcttcattggcaatgggaagcgaatccgaagcaagaatggtactctctcagcgccagtcccggccggcttcgcttatacagccgcggcatcgctcatccgttcaaactgagccgcctgccgaaccttctgatgcagaaattttcggggccaagcttcacagcaacggtcaaattgtcgctaaacgccttgtcggaaactatgatggccggcttggctgtcatgggaagggaatacgcctatctcggcttctcgaaatcagaaaacggttatcggctttctgtatacgaaggccgtatagaaggtgatcaggaagatgtcaaaacagaagagcgcggcgtacatgcggaaatggtctatttgcgcgtgactgttgatgaacaggcggtctgccgtttcagctgcagcatggaccggcgtcatttcacacagattgggaattcgtttcaggctgttcccggactgtggacgggtgccaaagcaggtgtatattgcgccgataccggcggagaagacggacaggacggatggtgcgatatcgaatggttcagtgtcgaaccggcaggaggggaatgccatgagcggtgaacacacatatacgaacccggtgttgaccggttttcatccggacccttcaattatcagagtcggggaagattattacatggtgaactcaacgttccagtatttcccggcaatcgttatttcccactctaaagatttagtccattggaagatcatcggccacggaatcacggaaaatgaaggattggacctgtcggatatcaatgattcgcacggcatttgggcgcctgatatttcgtatcataacggaaccttctacatcttcgcgacgcacaggctgaacggaccgactgtcatcaacggccgaaagctgatccgcagacagattatgatcaagtccagccgccccgaagggccttattcaaagcccgttttcattgatgaaggcagcggcatcgatccttctcacttcgttgacggcgacgggaaacactatatgctgctcagtcctgcctgcacgctctttcctctaaatgaagaatgcacagacatctccggcgagccggttcagatatgggaagggactgggagaagggcgcctgaagggccgcatttgctgaaaaaagacggttattactacgcgatattggcagaaggaggaaccggatattcccactcgattacgacagcccgctcaacgcatttgtacggtccttatgagccctgcccgtataatccgattttaacgcagacagacccggatgctccgattcaaagagcaggacacggcaagctcgttgaaacccagaatggagaatggtgggcggtgtatctatgcggacggcccaatcaaggtagctatacaacggttgggagggagaccgctttggatcccgtcgaatggacggatgacggctggtttgtcatcaacaacttgaagggcccgagtcttgttcagcgcgctccaaacctcccccaagtcaaatgggatgaaaagaatttcgacgattttgacgaggatacgctcggtcttgactggcagtttgtcaggaatcccgatcattccagctggtctttgaccgagagaccgggatatctcaggctgtggacaggtgattgggatttacatgacatccgtgcaaaaaatacggtcgtcagaagggaaaagcaccacctatacagcgccggcgtgaaactcgacttttcaccttcggcctccggagagcaagcggggatcgtctgctactacagcacgaataattatttgaaatgctgcttgatctatgaagaaggattgaagatcaaggtcgtggaaaatcgctccggttgccaaaaaacgctggggaaaaaacatgccgaggccggcccgctgtttctgaaagctgtcatcaataagcaaaagagggatttttactacagttatgaagggaagcattggcaccacgcgggcggtacagaggacgccagttttttaagcgatgagggttcgcgtgacgcaaagggacatacgggaacgatggtcgggatattcgccaataacggcggaagcggcagaaaggctgccgctgattttgactggttccgctatattgcatattaaatgtctctgctttttttcctgtattgaagcggcgggatgccgacgatctctttaaacactttattgaaatggctgatatgcttaaaaccggtatccgcagcgatgtccaatattttctcgtctgtatcacgaagccgttttttcgcttcgcggatcctgatgtgccggatatactcctgaagatgaaagccggtcacttttttaaacactctgcttaaataggatgggctgatataaaattgtccggccaatccgtctaacgtcatcgtttcttgaaagctgcaattgatatatgaagcgatttccgagattttttcatccatcgggtgaagcggccgtgtttgattgcggccgccgcccgcaaggctccggtaaatggtgaaaagcagctgaaacagcagcgccctgacgacatcctcgtgtccttcttttttcagcttgcactcctttttcatctccatcagcatatgttcgactgcggcctgttcacgcagggaaaatgcgatgaagttttgattttccggaaacggaagaagccgataatggctgcacttcagcaatggttctatgaaatcgtgcgagaaattaatcaggatgcgttcgaactcttgaacttccgtgcttgacgttcggtggaggtcgtggggattgatgatgatcatcgtgcctttttccgcggtatagacgctttggttaataaaatacgtgcgttctccgctcagcagataatacagttcatagccttcatgaacatgcggcgcgttcatctcggtaaatccttttctctgcatatattgaatcgaaaaagaatgctcggctatgaaatatttaggatggagcatgtcgggcattcctccttgagagcgttttcttaacaaacgggagggatcgtatgaaaaagttatgttgcctgatcttggtcttggttttttccgcgggctgtactcagcaaaaggcatcaacggaagaggacggggcgcttgaaatcaattggctcgtaccgctccacacaccgcagcctccgaaagagaaggcgcttgacatcattgaagacaaaacgaatacaaagctgaagctcatctgggttccggattcaacaaaagaagagcggatcaatacaacccttgcaagcggaaacatgcctaaagtaatgacattgcctgatcttgaagattcagcggttgtcagcgcgctgcgctcgggaatgttctgggaaatcggaccgtatttcaaagactatccgaatttaagaaaacttgataaaactatattgaaaaatatttcggttgatggcaaagtttacgggatttatagagaaaggccgatggccaggcagggagtcgtgattcggaaagactggctcgacaatctcggattggaaatgccggaaaccgttgatgacctttataaaatagcgaaagcatttacagaacaggaccccgatcaaaacggaaaagacgacacgttcggtctcgccgaccgcaatgatctcaccttcggagcgtttaaaaccctggcttcgtactttggcgcgccgaacgaatggggaacggacgaagacggaaatctcttcccctattttaagcatgaggcctataaagacgcaatggcatacatgaaaaagctttatgaagaaggcctgatgaacagggactttgcggtgacaagcaaaacgcagcagcaggatttagtgattcaggggaaagcgggaatctatatcggcgcgatgagcgatgccatgaacttgcgtgatcagggactcgctttgaaccccggctttcagcttgatatcgcaaaccggatcaagggccccgacggcaaggagcgcacatgggcgctcggcgggcatggcgggatgttcgccatttcgaaatcaagcgtcaagactgaaaaagaggtcagaaaaatcctcgcattttttgacagaatcgctgaagaagacctcaacaatttgatgttgtatggaatagaaggcgtacactatgaaaagaaaggggggagcggctattttcgaaagcaggaaaactaccatctgtgggaagcggaaattcagccgttaaaccagctgattggcgtcaataaacaagctttaaaaagcgctgaagatccgctccgcgccaaaaatgaaaagcttgaggaggacaaccgggcaatcgcagtccagaatccggccgaaccgctgtattctgccgcacagatggacaggggaacagaattgaagaaaatcattgatgacgccacatttcaatttattctcggggaaatcaatgaaaaagctttgaccaggcagtcctgaaatgggagaagcatggcggcggaaagatcatgaaagaactgaatgaagatctgaaaaaagcaaactaaacagaaaaccctttccatttttttgaaaaggaaagggtttttcatcgtattcgctccaagttcattttctttaaattctgcaaaataaacaatataattccatcataggacgaaaaggaggaagcgatatgcagactgccgttatatatgcacacccaaatccaaacagtttcaacggagccattttaaatcaagtcataaaggcgcttgaggacggtaagcatttttatgacgtcattgatttgtatagagaccggtttgatcccgttctattatttgatgaaaagaaaaggcgctcagatatgaatcgcgatccggaaactgccgaatatcgaagaattgtcaaaaacgccgaccatctgattttcatttatccgctttggtggggcggaatgccagcgatcatgaaaggctttattgaccgcgtttttgccgccggagaagcctatacatatcaaggaaagctgccaaaaggcctgctgaaggcgcgcacggcatcagtttactacacggctgacgctccgtcttggtatttgcggttttggcagcgggatgccgactgggtgacggttaaagatgtgatgttgaagttttgcggcgtacggcgggtaaagcgcctgctgtttgccggcgtgaaagacagctctgaagaaaaacgcacgcaatggcttgaccgtgtctaccggtctatagctcctgcagatcgggggatcagcaaatgacaaaggagatgaagtggctggattgggcaaaggaaattcaagctatcgcccaggcggggcttgcctatacaaaagatgactttgatcgtgaacgttttgagcagcttcgcgagctgagctgcgaaatcatcgccgattatacggaaacggacttctctaaagtgaaagagctttttgccggggaatcgggctatcaaacgcctaaagtcgatgtgagagccgtaatttttaaagatcataagctcctccttgtccaggaaaaagcagacggcaaatgggcgctgccaggcggatgggcagacatcggctttacgccgaaagaaatcgcggttaaagaaacgcttgaagagacaggtttgaaagtcaaggcgcataaacttctggcggtcatggataaaaagcgccacaaccaccccccttccgccttccacatctataagctgtttatctcctgtcaaattgtcggaggcaaggcggaagcggggactgaaacacaaaaccttggttttttctcattggagaatctgcctgaattatcggcagcaaggaatacctatgaacagatcgaatatctttttgaaaagcatgatgaagtgtattgcgactaagggaggaacagacaatggatcagttgaaatatccgatcggcaccttttccaaaccgcttgaagcggacgaaagggaactggaaaaatggatcggggatctgaagcaagcgccgcatctcctgagaagcgcggcggcggaactaaatgaagaacagcttgatacgccgtaccggaccggaggctgggctgtccgccaagtcgttcaccatcttgccgacagccatatgaacggctatattcgaagcaaattggcgctgacagaagagacgcctttgatccgcacgtttgacgaacagaattgggccgggcttaccgatgccagaacgctggatccggatttgtcgctggcgcttttagacacgctgcatctgcgctgggctgctcttttttgaatctttgacagaagcggattttgaaaaagcgtacatttatcctggcacaggtgaggagatgaagctgtatcaagcgcttgctctctatgtgtggcactcacaacaccatattgcccatattaaagcgcatcgaaaaagaatgggctggaattgaaaaaaacgcgccgcgggcgcgttttttgtttgccgtttgttttcagaggggattgttaacaataacataacagcggaatcgttggttattgctttttctagccggtaaattaaggtaagatatatgagttatcacccaaaacgtgatggatttatcttgcgattagattagagagaagtggtttttcatgaaaaaaaatgcgctggcgattttaaggatcgtgattccggcggctgttcttttgtttgtcttttttcaagcgaaaaaagaactggccgggctgtcttttaaagaaacatttttgattatcgatcaaattaatcggattgacctattcatccttgtttttctcggacttgccgccattttggcgatgacattatacgattttgttctggtccgctccctcggaatgaaggtttcgaaatggaaaacgatcaaagtatcatggatcgccaactcacttaacaatgttctcgggttcggcggattgtccggtgcaggattgagaacgatcctttacaaagagcatgttgatgatgtgaagaagctgatcagggggatcgcttggcttgcgtcttcggttcttctcgggctgtctgtcctcagccttctcgtccttgccggaattctgcctgccggggatctgtttacagaaaaaacgtgggtgctgctggctgttgccggtacggcgatgatcgctcccggtgcggccgtcattttaatgatcaaaaagaagagaagcagaggagccgaaaagggcatgcggctttcggtcttcttttcttatctgggtgcatcggtgatcgagtgggttgccgcagcagcggtcatgtattattcccttgcaacgatgggcgtcgaattggacttaaaaaccgtcatcggcgtttttacgattgcttcggtggccggaatgatcagtctcgttcccggcggattcggttcgttcgacctgctttttttggtcggaatgagccagctgggggttgatcaggaaatcactctgacggcgattgtgctctaccggatcgcctattcgtttatcccttttgtgttcggtcttatttttgcagcagccgatttgactggaaatacgatgaagaggctcgaagaaaaaccgattattgccccggcaatagaaacgaccaatattctgttgattttacacagagcgctcctattcagactgctgaacggttcgctttcagtcatcgcattttgcagcggagcgattgtgatcgcatctgtggcgctgccgattgacaggattacattgataccgaatatttcgaagttcatgctggtgttttttaacggtttgtccctcagtttcggcttgattttgctgattctgccgcttgaactttatcggaggacaaagagatcttattatatgacgctgaccgctttggcgcttgcctttctgttcacgctttttaaaggctttaatattagcgccgtcttcatgattcctgtggtgtttgccctgtttgtattgctgagggggcagtttacaagggagcgggctgtctacacattcgggcaaatcgcatggggagcttttatcttcctctttactttattgaattacaatattatcgcttcacacatttgggaggcgctcggccatcttcttgtgaaagattatttcattcacagtgaacgccatgtcgacttcgcgacgttttttgcgttatttttcgttccgctgtatttcgctgttttcatctgggcgtttaacaggaaaacgaaagagatcggtgaagagcctgatccggagaaactggaggcattcttagaagaaaaaggcggcaacgctttgagccatttaggctttttaggggacaagcggtttttttattcaagcgacgggaatgcgctgattcaattcgccaaagtcggccagcgcctcgttgtgctcggcgacccgtccggccgggaagactcgtttccgctcgtgatcaaagaattccttcatgcggctgaccaaaaagggtatcttgtcattttctatcagatcgaacgcgaagacatggcgctctatcatgacttcggataccgctttttcaagcttggagaagaggcgattgtcgaccttgacacctttacaatcagcggaaaaaagcgggccggactaagggcgatctacaaccgttttgaacgggaagggtatacgttccatgtcgaacagccgccgttttcgagagaattcctcaacgagctgaggcaggtgtctgatgaatggctcggccgcaaaaaagaaaaaggcttttcgctcgggttttttcaagaagattatttgcaaaaggcgccaattgccgttttaaaaagcgaagaaggcgagatcgtcgcgtttatgaatatcatgccgatgtaccgcgaaggggaaatatccatcgatctgatgcgctattcgaaaaaggcgccgaaaggaatcatggatgcgctgttcatctatttatttcaatggggaaaagaacagggctacacggccttcaatatgggaatggcccctttatcgaatgtagggacaacgtttcagtcattctggacggagcggctggccgccgtgattttcaacaatgtcagctacatgtacagtttcagcggactgcggtcttttaaagaaaaatataagccggtttggcgggggaaatatttagcctatcggaaaaaccgatctctcccggtaacgatgatccttgtgacaaggctgatcggaaggagaacgaaatgaggccgtttattaaaacggccttttttttatattgccattgtaagaagcactcaaaaggcggtatactgcaaatgattggaagggaaggatcgaatcgacaaatgggggatcaaaatgaagccaattgaagtattaagatatgacgcattttcaaagactgcgggtcaaggaaatccggcgggcatcgtgcttgaagcagacgggttgaccgattgggagatgcagaagatcgctgaacaggcaggctataatgaaacggctttcctgctgccgagcgagtcggccgacataaggatccgctactttacgccgggccatgaaatgaatttatgcggacatgcgactgttgcttctctttatgcgcttttggaaaaaggcgcgattgaagctggcgcggagctgaaggtcgaaacaaaagcgggcgtcctttctgtgtataccgcctcagacggcaatcggcgttttttggtgacgctggagcaggcgcccccgtgttttcagtctttcacaggaagcagaagccaattggcggaagcgctggggatcagcgaagcggactttcatgaagcattgcccgttgtttatggaagcacaggtatatggacattgcttgtgccggtgagagatttggccgcaatccgcaggatgaagcccgttcaagctgaatttccgaacgttttaaccgagatgccgcgagcatctgtccacccgttttgcctggagacgatccatcgggattgccagcttcacggcaggcatttttcatcgccttattccggaacgagcgaagatcctgtcacaggaacggcatcaggagtgatgggcgcttatatgaaaacgttcggaaaggaattctgtgaagagggccagactgattttcagatcgaacagggccaggaaatggggaaagacggaaaagtgaaaatcgaagttgcggaacaaaacggcatcatgaaagtgcgcatgacaggaaccgctgtatttgctgaaaagcaaagctttgaagtgtaaacaaacaccgccttttttagcgagtggagatcattgcaaacgccagcagttaacattataatcaacaatgataatcattttcattaagggggcggccacatgaacgacacgctagaaatccaaagtattcgcgattgcgtcagaaatagaagaacgattcgaaagtttaaacaggatccggtgccgaaggaagtggtgctggaactcttggaagatgcgatttatgctccgaaccacaagctgacagaaccgtggcgattcatttatatcgggacggaaaacgggaaaaagaagcatgccgacaatttaaaagcggcgtttaaagagctcaagccgaatatgcaggaagaacaaatcaataagttcagggagcatattctcagcgttccggcttttctcttcgttattatgaaagaagacgaaaacgaacgggtcagacgggatgattttgcagccgtcagctgtttaatccaaaatctgcagctgctcgcttgggaaaaaggcatcggcatggtatggaaaagcggggaagttctctctcatgaaacactgcacaggttaatgggactgaagcgcgatgagcaggtagcagctctcttgcagatcggatatcctgcggaaattcctgaagcgaagcacaggacgccggccgcacagctttttaccgaattaacttaaagaatgaggcccggaacgtcgaatcccgggcctcgattattattttgactgccgctttttcgcgcgcttatcagctgcctgcatgcgggcttgtgcttcgcggtcatcctgatcggcgagttctgctgaatattcctcatacactccgtcagcttctcgcttatactgatcaggaacttgagggagtttttgcttgtttttatcccggtttttgtggattgcatttctgcccatatgatcactcctcatcaataatcggccggtcaagccttattgttcgctgatcaggctcccgctatgcattacgatttttcccttgcggcgcgctctgccattttaaattcgcgcgaatatctgacttcctgcgtcttgttcagagtggatttaaaacgttcgcgttttttcttgtcagccatcttttaagcctcctaaaaacctaagttattcacaggctgtccgtttccgcggcatttatacaagttttaagcttcttttaaccggctgttttcctcctcgaatgttctcatgctgtacagcgtgtacaaatctttcgggatttcatacaggtgaaatgtatcgctgccggcccagtcaagatcagtcttgacggcatatgggagcttttccgcggctttgagggagcgcatatttgtttttctgattttcataaaaacggcttcaatttgcttttcataaaaaagctcgcaaaaaaacgcgtctttcgcccgctggttatagccttttccatggtaaggcttgccgagccatgtgccgaggaagcctttttgctcttcgatttcatacaagctgatgcagccgatcgggttttcccattcatcaagtattgttcgcgatatcagctttccctgttcttcctcttcaatcatgtttttgacatgaaacatatactcttcaatcgtctccgctttatttctgacaaaagggaagacatccggatgaatcatcagttcaaaaagtgcatagcagtcggtcagttcccgtttcttcagcatggcagcccctccttagtttgagggcggcttttacagcagaacgggacgcgtgaatccaccctcggaattttttaattagcggaagcagttgtccgcgtatcttgcacatccattaaaaaattcggggtgggaatcgaacccactaaaaccagagatctggtggcgcaccatttgccttccctgtacgtgtatgctgctaaaaagatacttacattttacgcagctgggaaaggaaaagctacaaggattttgccggaaaacgccttttatgccagaaggttgtgcagggcatctttcgggatataagaaatgatagccgttctgaagcgcttttttcgggaggacgcgctgtcctttcagcacgagcatgctcatttctccaagtacgccttttatcgcaaattcgggaaccgggagccagtgtgggcgtttttctactttcgcgacggtttgcccgaatgtatccatctgaacgggattcggtgccgtgacattgacggggccggacatcagcgtctgttcaatcgcagataaaatcatgccgacggcgtcttcgatatgaatccatggcacccattgccgccccgagccgatgcgtccgcctgcaaacaattgataggggagcgccattttcgggagcgcgcctccgtcttttccaagcacaaggccaaaacgcatccagacggtgcggatgccaagcgcttcgattggttcggctgcctgttcccacaaagctgtcgttctgcttaaaaaatcctcagccgaaactggagattcctccgtgaatgtctgttcaagactggttccgtaaattccgactgcgctcgcctgaatgagggtgttcggcttcttctgaagactttgtatgatgcgggccgactcctccacagagcggaggcggcttgtcgcgatctccgccttcgttttttcattccaacggccgaaaagcgattttccggctaaattgatccaaacatcgatatcggtcagatctttttcaggacgggcgccgtttttttgccagagaacgaaagaagtgtttttttgttcggtttcggccggttttcttgttaaaatatagacgtgatgtccccgggcggttaaggcgtttgtcaaatgtctgccgataaaacctgtccccccggcaatcgcaatcttcatcatgattcctccctttcatgatcattaaccttattgtaaaagaagaaaacaaaagaagggagttatttatgccatatattacaaagatttctgcccagaaaaacaatgaagagcgggtcaatatttttctggatgaaaaatatgcgttcagcgtcgacctggacgtgctcgtcaagtttgacctgcgaaaaggcaaagagcttgatgagcttgatatcattgagattcaatacggagacgacgttaaaaaagggttcaaaaaagcgctcgattatttgtcataccggatgcgctcgacaaaggaagttcaagaccatcttaagaaaaaaggcgtcgcagactccgcgatcacagaaattctgcatatgcttaaaggttataaatatttggacgaccgcgaatttgcggctgcatatgtcagcacccacagaaaaacgagcggcaaaggccctgatgtcttattcagagagcttaaattgaaagggatcgatgatgaactgattcatgaagcgctcagttcgttttcgttttccgatcaggtcgaggccgcggtcaagcatgcggaaaaagtactgaaaaaagaaaaaaagctgtcctccaaagagacgaagcaggccatcgaacagcaccttgtcagaaagggtttctccttcgatgtcatttcggccgcgcttcaggaaaccgattacgaaaacgacgatggcgctgagagagaagcgcttgagaagcaaggagaaaaagcaatgaagaggtacggttatgacggatcatacgaaacgaaaatgaaggtcaaacagtatctgtttagaaaaggattttcaattgacttgattgaccaatttttagatgaaaagggatgagaagatggagaaaagatacagtgaaatgactgcacacgaactgcaccaggaaattgcgggtctgaccgaaaaggcaagaaaagcagaacaaatggggattgtgaatgaactggccgttcacgaacggaaaatcgcgatggcgaaagcctaccttcttgatccggccgattttaaagccggcaacgtatacgaaatcgaagatgggggcgacgatttccatatccgctatttaaacggcgtattcgcctggggataccgtctttcgtcaccggatcatgaagaggctctgccaatttctttattaaaagaaaagggctaagacaaaaagcctaaacccttttcataactgctatcttgtccggatgcgcgtgttgcgctggagaatgatgagatcctgagtctgctgcgtttctccgttcacctgcgcgcgcgcatgctttgtgtttgcccatggctgcggatagttttgcgttttcatctggttaaaatcgtttgtatacggtttgcgatttgcacacaacagaaatcactccatcccagaaaagtttagcgtttgccggaagccctcattctttcttgaggatgagtatttgtgcttccgtcagggcgctttgaagcaaaatcatctttggcccggggctcgccttcaaatttattgttgttcatgttcggaaagcctcttgatttatttcgcatctctttttaggctcctccaatcaagtccataatatttgcgtcttcggttcggaagacgtaaggttagtatatgaaaaggacgacgttttcaaaaagaaagttttttccttagggaaagggggaaaagccaagtggaagagtactttgaaaaactgacaaatgcgcttcttgaaaaaaatcatatgctgagctacgcacaagccagaacatgggttgaactgctgtggggcgatttcgaggcgacatttgcaaaggccggccacccgtacagaggaaaagagctgacagagcgagtcgtcaaagagtggattgagcactacggcagccagttgcatttatttcaaaatgacaagccttcttaccaggatctgttctccggagcccgcgggctgcttcattaagcattgctttagaaggaaatgatgcattgtctgactgtgccgcctggcactggccttactggatgaggacggtaagggcacactaaaacaggtgcgctccgcgtcagcaaatataaagaaaatgaagcggctttcgcgccgcgaggtcaaatcgtccggttaacgaactgtgaaagaagaaagctttttcctccgcttgcagagagagccgagcaagagcagaaaagctctccttcgggcggcagaaaacatgttgccgttttgcggaatgggaaagtgaagctgtcatgcgaaaacggccggcggcggagccagatccggttttcgcccgatgacaaagacttgctcccttttgcccgaacatatcaaggaaacggatttgattgcggcggcggggtttggcccctaacaatcagtcctgatgcaagttctcttgcggctgctttggtttcggggaagattgaacttatgtgaaaaatgtcgcaaaaggaaaaattgttatgttgccctgattgaagctaaaggaatatcatttttttaccacttgttcatagatgtctgatataatgacaaaataatcttgtagaaaatagtacagcgtgcccacagttttccttttgttgtgtgggaagcggctagatgcaagtatcctgccaagcggatgccggatgcaattttattatgtccaaaagaggtgcctttaagtgaagaaaggattcgtttcaatcattattccttcatacaatgaagcaagcaatattaaattgatttatgaatcgttaaggaacgaatttcaatccattgattatgattatgaaatttattacataaatgatggaagcactgatcgaacattggaggaaattaaaaaactagccgaaaaaagcgagcatgtgaaatatatttcgttttcacggaatttcggcaaggaggcagccatccttgccggttttcagcatgcccgcggcgatgctgttgtggtgatggatgcggatttgcagcacccgacatacctcctgcacgattttattaaagggtatgaggaaggctatgatcaagtggtcgcccagcgcaacagaaagggagacaaccccgtgcgctcctatttgtcatccctttattaccgctttatcaacaatgcggtagaggttgatttaagggacggcgtcggcgattttcgtcttttaagcagaaaagccgttaatgcgatgctgaagctgagcgaaggcaacaggttctcaaaagggctgttttgctggatcggttttgaccaaaagattgtttattacgagaacgtcgaaaggaaaaacggaaaatccaagtggtcgttccgccacttgttgaactatggaatcgacgggattgtgtcgttcaacaacagaccgctgagaatgtgtttttacgccggtatttttatcctttttctatcgcttatttatatcgcggccacattcatcaggatcttaaaatacggtgtgattgttcccggctattttacgattatttccgccgtcctgtttctcggcggcgttcagcttctcagcctcggaattatcggcgaatacatcgggcgcatttattatgagacgaaaaagcggcctcattacttgatacaggaggcaaacatcgctcatggagaaactcatgaaaatcgtgaatcctgaatttattcgctttgccgttgtcggtgtagtgaatactttgaattactatgcggtttatttgctgctgcatgttttgcttcagttgaattatatggtttcgcatattgcagcttttttcgtcagccttgtgatttccttttttctgaactgctattttacttttaaaatcaagccgacgctggcaaagtttttgcaatttccgctgacacagctctttaatttgacggtatcttctttgttcgtctacacgtttgtgaattttttcaagatgaacagtgaggcagctccgcttgcctccatgtttttaaccgttcctctgacatttttagtgacagggaagattttgaaaaaagacaggggaagagtatgaagaaaacagtttttctatttgtgatcgcaagcattgcagtttccgtggccgcccattctttttttctgtatgaatgggcgcatgaccgttatatgacggggaacggcgacggacttgcacaaatgatcatttttaagtcgtttctttttgagcaatacaaacaagggaacttcttttattcgtattctttcggtctcgggggcggcatctacagccagctcggctattatttcacgacttcttttgtcttcatcgcttcattcgcggccgtttttctgatgcagcttttgcatttggccggggatgcggatcctttgttttgggcgcaggccgccgtattcatcagtgtcatcaagctcagcctgatcattttagcggcagcgtatgcgttaaacggtatggtgaaaaacaagcttgccgcctttacgggtgcggttttgtatggcacatcggtaatctatttcaggcacacggtgttctgggaatttttcagcgacgccatgctgtggctgccgctgcttgtcgccggagctgagaaagtcatcagagaaaagcggacagcactgtttattaccgcttgttctttgacgctgatcaataacttttactttgcctatatcaacttgattttcattgcgatctatatcatcttccgctggctgatcaggcttgacccggaaaaggaggcgccgaggtggaaacaattcagaatgttcgccgcttcaggcctgatttctttcggaatcagcgcgatttcctttgtgcctgcagtttacggctttttaaacaatttgcggccgccgtatgaccaggctgtcgctgtatacgatctgacggacaacattctgttttccagccgcattgtcttgctgccggctgtctttatgctgttcttgttcgcattttccttctataaaaataaaacgttcaggctgtttgcctcaatcagtgtgctgcttgtgcttctgcattacagcccgcttgcggcaagcgcattcaacggtttctccgctccgcagaaccgctttgaatacctgctcgcttttacgatcgggggagcggcggccgcaggaatgaccgaactgaaaaacatcaggcggaaagagatgatatggtctatcctgcttgtccttctggtttatatcgcggtcatttggcggaaagacttggatttatcacttatgcaaaattggagcattattgtgcttctgttcctgacaatcgccatatttacggcggcggggtttcaatataagaaatcgcagctttttttgcacgtctgcattttattatcgtccgtcctcgtggcgaacacgtatcaaaagtatgttctgtctgagtcaagcggcattaaaaacgtcacgaaaagctatttgaccagcaatgagtacaatggcgaagaacagcgccgcctcctgaacaacattcgaaaagacgataagggtgacccctatacaaggatcgactggatgaacggcgtccgcaacaatactccgctgatgcaggattttaacggcttcagcgcctactcaagcattctcaatcgcgatcttcttctgttttattgggaagaccttcaaatcgatatgggaagggaaagcgtcagccgctacgcatcgatgggcgaccgggccaacttgtacagtctgctgtacggcaagtattacatgacggaaaaagacaatgccgccaatgttccgtacgggtttattcaaacggatgaatcagagcactacacagtttataaaaacaaatacaccttgccgtttatccggacggcgcgaacgttgtttacggaaaaagctttagcagatgcgccagttttagcgcgggagcatgcgatgcttgaaggaatcgtgcttgagaatggcggtaacggaaaagagcagccgccgagcgttcctgatttgatgaagcagacgaagctgaaaaccgagggggcgagctatcataacggcttcctcgacgtcaccgctgaaaacggaggcatcgatctcattcccgaaggcggggttccaaaagaaggcgactattatgtcggattttatttaaaaagccttgcaaaagaccagttcttcaacttgcgggtcaatgattatgtaacatcaagaaagtcaaaccagtcgatttacaaaacaggtgtttacgatttaacgatcagggtgccgaaaacagataaaatttcaatcaggctgccaaaagggaaatatcaattggaccatttgaggctgcaccaggaagactatcaattgctgaaaaaagccgccgccaaaaaaacgccggccgccgacttgaactggcggaacaatcaagtgtccatcagctttgacaatcaaaacggagaccgctacatggtgctgccggttccgtacgaaaaaggctgggaagtcactgtaaacggaaaaacgcaaaccgttcaaaaggcaaattacgcgtttattggaatccccatcgaaaaagggaagaacaacatccgtctcgtttattacccgccgtacttcaaagctaccttggcggttacagtcatcagcctcatcatcggaatctggtacagcagaaggagaaaaaagcttggctcttaaacagagccaagctttaattttttttgaagtttttcctcgctgaaaatccatccggtataggaggtgattaattcgagcgtgtccctgtcgatgtgtgcgatcgccacgaaagggtagtgtcctttgctgcggtatcgcagatcgataaagcggacttcgtaatgatccttatacgtatcgatctcccatttgtaaaccggtgagaacgaaagaaacgccgaaatgttcttatcctgtttcgccgctttcatcacatccgtatccggtaaaggcaccctgttgaatgtgtcgacgatcacgacgtttccatccatgctccgtccgacgtaaaaagccgattttgctttgacggcgattcgccattgcctgaatttcatcgtaggcgaaataatgatttcttcaatatcatcgattttttcacggagctcatgcttgattttcctctgcatgaaatacctcaccagataataaccggccaagacgatgtaaagagccaaaaatgtatagccttgatgcgcgcctgccagccaaaaggcgatggctatgagatggctgacgaaaataaacggatcaaatgtattaatcaagccgagcgctacccatttccttgaaaacggtctgaccgcctgtgtcccgtatgcgttaaaaatatccacgaacacatgaagcgcgaccgcggcaagggtccaaagccacaggtgaagcagattggcttcgggataaaacagcatgagaatgcccggaatcatcagcgaccaggcgagaacagcggggatggagtgggtgaatcccctgtggtgcctaatataaacagcgttgtttttcaatttcaaaacggtatcgatatccggagcctgagatccggcgattgtcgcaatcatcacggcttgagccattgatgggtccattccgacaactggatcaagcgtcgcgatgcctccgagtgcaacgcccatgacaacatgtgtgccagtatccattggtgacctcccctaatggtgctagaaaatcatttttattttccaaaaacagaacgaacgatggaccttgcctgaaatatttaacgcttttgctttcttcacttttaatgtaacatgttatcgtatatgcatatagtttacaacaaaaagccgaagtaacaaaagatcggtatgcaaatgtgacgtgcacaggcaaggagaagtttcatgatggatctgcaaaagaaattagagcaaaaaaacatcaaacaatttcaagaagatttaatttcttggtatgagcaagaaaaacgggatctgccttggcgctcagacagcgacccttataaggtgtgggtgtcggaagtaatgcttcagcagacgagagtggacacggtgattccttacttcaacaactttatcgaaaagtttccgaccgtggaagcgctcgctgaagccgacgaagaaaaagtgcttaaagcctgggaaggactgggatactattcaagggttcggaacttgcagagcgctgtcagggaagttcacgaacgatacgggggtgtggtccctccttcaaaagaggaattcggcagcttaaaaggcgtcggcccttatacaagaggcgcggtgctgagcatcgcctacaatcagccggtccccgcggtagacggaaatgtcatgcgggtcatgtcacggattctttccgtatgggatgatattgcaaagcctaaaaccaaaaccctgtttgaaaaaattgtcgaagcgtttatttctgaggaaaaaccgtccgagtttaaccaggggctgatggagctgggcgctgtcatctgtacgccgaaatcgccatcatgccttctctgcccggtccgagagcactgttctgcttttgcagaaggctgtgaaaaagagcttccggttaaaagcaaaaagaaaaaaccttcggtaaaaacccttgcagctgtcgtcctgactgatgaagaaggatacatctatatccataaaagaccggcatcaggtcttttggcaaacctttgggaattcccaaacacagaaacgcagaaaggcctgaagtacgagcgcgagcagcttgcggcgtttttgaaagaagaggccggaatagaagctgaaatcggtccgctcgaaggagtcgtagagcatgtgtttacacaccttgtctggaacatttctgtctttttcgggaaaactctcgatcaaccggatgattcatactttaaaaaggtcacgaaagaagagcttgctgaatacgccttcccggtttcgcatcagaaaatatggaatatgtatatgaaataggcagcttgactgtgcatgctgcccgttagtcgtactggatggtggtgccgtgcgtataatcggcttcctggcggcacagtccgcctcttgcttgaatttctttcacaacctccaggtactcggcatgcccttcttcattgagaaatggcatgatttgctggaaggcgcggtgaaaatagagaagctccgcatctttccactcgtttttcggcgtgtggtcgagctcgctcatatcgcgtcctacgtacataaggcgaatgcctcctttttgatcgtgttatgagctattttttatcagattttcaatcactatactaggagatgaatgacagatggaacaaagaaaatgtgcccttattacaggaagcagccgcggcgtcggcaaagcagcagcgctgaggtttgccgaaaacggctacaatatcgtcatcaactatgctagaagcaaaaaagcggcccttgagacggctgaagaaatcgaaaagctcggtgtcaaagcattggtcgtcaaggcgaatgtcggacagccggcgaaaataaaagatatgtttcagcaaatcgaggaggcgttcggcagactggacgtgttcgtcaacaatgctgcatccggcgtattgcgccctgtcatggagcttgaggaaagccattgggactggacgatgaacatcaatgcgaaagctctgctattctgcgcgcaggaagcggcaaagctgatggagaaaacgggaggcggccacattgtcagcatcagctcgctcggttcaatccgttatttggaaaactatacgacagtaggcgtttcaaaagctgcgcttgaatcattgacgagatatcttgccgtagagcttgcgcagaaaaacatcatcgttaatgcggtttcgggaggcgcgattgatacagacgccctgaagcattttccgaaccgcgaagagcttctggaagatgcccggcaaaatacgcctgccggccgcatggtagagatcagcgacatggtcgatgcggtggaatttttaacgtcagggaaagcggacatgatccgcggacagacgatcattattgacggcggccgttcactgctcgtataaatttttcgcgttcaatgaataggatatcaccctcctgcacaatctaatggtcgtggaggtgatatacaatggctaaccaacaatccaaaacaaacgcacaaaaagtaagacaacaaaaccaagcttctgcacaaggtggtcagttcggcactgaatttgccagcgaaactgacgcgcagcaagtaagacaaaataaccaacaagctgagcaaaaaaaacagcaaaacagctaatcactgaaacaggaaaaagcacttcaccatcggatgaggtgcttttttctttttgttccgacaaaacttccgaatcttagccagaatcagtcaaaggacatccggcatgtatagagaaatgatacttaggcaataaatggagtagagcatagaatggaggatcccgaatgccggaatttgaaaatttggttcaggggcagatggagattatggataagctgttgtatctgcaagcggagattgaaagatgccagaaaattgaaaaagaactggctgcccttgaaaagaaagcccagcttttatcgatccgggaagatatatcccagaagcggaaagatcttgctcagattcaggatttgttccaaaagcagacggagcaggtgattcaggcttatcaaagaatcgaggcatgagcctctctttatcgttttttagaaaagagccattcctgttcgggagtggctcttttattttcattttttattttcaaacgttataataaataaaagaactgtcggacaggcgatgtgacacactgacttgtaaggcttttgcaaagaaagtaggggagaaaacatgggctttcccaaggaaggagaaaccattcaaattcatagctataagcacaatgggcagattcatcggatttggaacgaaacaacgattttaaaagcaacggaattgtgcatcatcggcgccaatgaccggacaatggtcacggaatctgacggccggacatgggtgacgcgagagcccgccatttgttatttccatgcaaagcagtggtttaacgtcatcggcatgcttcgtgaagacgggatttattactattgcaacatcagctcgccgtttgctttggacgatgaagccatcaaatacatcgactatgatttagatgtaaaggtcttcccggatatgacgtatcatattcttgatgaagatgagtacgcggatcataaaaaggcgatgaattatccgaaggaaatcgacggcattttaaggtaccacttaaatacgctgctgcattggatacaccaaagaaaaggcccgtttgcatctgaatttattgatatttggtatgaacggtatttgcattatacaaaataatcctaaaaaacctgttgaggccaacaggttttttgcggtgtactcacacatcaagatatagaggggggaagacgtgtgggggtaatcagaaggtacatggaatttgtgaagccgtataaatggaaaatcgttttgacggttttaatcggtattattaaattttctattccgctggtcatcccgcttctgctgaaatacgtcgtggacgacatcatccaggggagcgggactgctgaggaaaaaacatccacattattcatggtaatggcggttatgttcgccatttttttggtgcttcggccgcctgtcgaatattaccgtcagtatttcgcgcagtggacggcaagcaaggtgctttatgatatcagggacaagctttttgcgcatatacaaaagctgagcctcaggtattatgcgaacacccgcgcaggagaaattatttcaagggtcatcaatgatgtcgagcagacgaaggaattcgtcatcatcggattgatgaatgtatggcttgacgtgatgacgatttttatcgccatcgccattatgatgacgatggacgtgaagctgacgcttatttcgatcgtgctgtttccgctttacggactgtctgttaaattcttctacggcaggctcagaaagctgacgagagaacgttcccaagcgctggccgaagtgcagggccatcttcatgaaagggttcagggaatgcctgtcatcaggagttttgcgatcgaggattatgaacaaaagcaatttgatcacgagaacgggaattttctcggtaaagcaatccgccatacggcctggaatgccaaaacctttgccgtcgtcaatacggttacagacctcgctccgctgatcatcattacggttgcaggttatcatgtgattcacgggaaccttactgtaggaacgatggtggcgtttttcggatatatcgaacgcctctacaacccgctgcgccgcctgatcaattcctcgacaacattgacgcagtcgatcgcatcaatggacaggctgtttgaatttattgatgaaccgtatgatttaaaagataagcccaatgctgtaaaagcagagcgattaaaagggattgttgaatttaaaaacgtttcctttcaatacgaaaaatcggaggaaatgattttgcaggatctttctttgaaagccgaacggggcgaaacggttgcgctcgtcgggatgagcggaggcggcaaatcgacgcttgtcagcctcattccgagattctacgatgtctcagccggaagcctggagatcgacggcatcgatgtgcgcgattatgaggcgcgaagccttagaaaccaaatcggcatggttctccaggatacgtttttattcagcgaatcggtacgcgaaaacatatcgatcgggaatcccgaagcttcgatggaagacatcattgaagcggcaaaagctgcgaatgcccatgattttattatggagctgccgcaaggctatgatacaaaggtcggagaaaggggagtcaagctgtccggaggccaaaaacagcggatatcaatcgccagggtgttcctgaagaacccgccgctcttaattttggatgaagcgacgtcagcgcttgaccttgaaagcgagcactatatccaggaagcgatggaaaagctcgcgaaagaccggacgacctttatcgttgctcacagactgtcgacgattacccacgctgacaaaatcgttgtcatcgaaaacggacgtgtcgcggaaatcggcacacatgacgaactaatgagccgcgacgggcactataagcatttattcaccattcaaaaattaaactaaaaccgcaaaaagcctgactttcgtttgaagctgaacggatgtcaggctttttctttccccgcaaatttcgtacatatttcctatctcgtttaaatacaatttaaaaaatacaagctccggaggtgtataagtgacaaaagaaaaattgcttgaagtatcggatttatcgatttcgtttcaaaagaaaaagtccgaaaccccgattgtgcaaggcgtttctttcgatctccatcccggagaaatcatgggagtcgtcggagagtccggctgcggcaaaagcgtcacctctttggctttaatggggctgaacgcaaacacccggacgacgggccggatcaagtttcaaaacaaagaccttctcatgcagtctgaaaaagaatggagacagatgcgcggcaatgacatcgcgatggtttttcaagagccgatgacctccctcaatcccctttttacaattggcgatcaactaacagaagcactctccagccataccaatattcataaaaaagaagcaagaagaaaagccgttcaaatgctggataccgtcggcctgccgaggacggaccagctgatgaagcaatatccccacgaactgtcgggaggcatgaggcagcgggtcatgatcgcaatggcattaatttgcgaaccgaaactgctgattgccgatgaaccgacaacagctctcgacgtcaccatccaggctcagattctgtcccttttgaaaaaaatgaatgccgaatttaacacagccattctccttattacccatgaccttggcgtcgttcacaatacatgtgaacgcgtgatgatcatgtatgccgggcggatcgttgaagaaggcggtgtcaccgctgtttttgacagcccgaaacacccctatacaaaaggcttgttcgcctctattccggcattcacaggcaaatccgagcgtctgtcttcgattgaggggcaggtgccgaaaccggggtcgataaaaaaaggctgtatgtttgcgccgaggtgccctcataaacgcgaacgctgcgtagaggaggagcctggattgaacaggctggcggatgaccatgctgtaagctgctttctctacgaagaggaaggtgctttcacatgaatcatgaactgctgaacgtccaagagctgaaaacgtattaccgcgtgtcccgcaagaaaatcgtcaaagcggtcgatgatgttacactgtcagtcaaaaaaggcgaaatcgtagggatcgtcggggaatccggctgcggaaaatcaaccttgggaaaatcgatactgcggctgaccgaaccgacttctggaaaggtgacgtttctcgggcgggagatgaccggccttgatgcaaaacagcttcgcaacatgagaaggcatatacaaatgatttttcaagatccgtacgcttcattgaatccgcgcatgaaaataaaagatattttggaggaaccgctgatcgttcataaactcggaacgaaggcggaaaggagagaagtcgttcgctcgatgcttgaaattgtcggtcttgatgcttcatacggcgaccgatatgcacaccaattcagcggcggccagaggcaaaggatcggtattgcaaaagcgctgatcacaaagccgaaattaatcattgccgatgagcctgtttccgcgcttgatgtatccgttcaggcgcagatcttaaatctgctgtctgatctgcaggaggcattcaatttaacgtttctgtttatttcgcatgatctcggggtcgtccgctatatcagcgacagggtagccgtgatgtatttcggaaagattgtcgagatggcggacgccgactctttatttagagaaccgaaacacccctatacagaaacactgttagcggcagtacccgtcatcggcaaaggagaggcggttcatacggcgccggatattgccgcgccccgcatgagtgaaaagggctgtcctttttacagccgatgcatgaagcgggcggacgtctgccttgaagcggagccgcttcttgaagagactgcggacgggcattatgctgcatgccattttaccaataaggaggctgtacgatgaaaaagaaaagctggctgatctgtttgggaatgattctgtctgtttccgcttttttaatgggatgctccggtaacgaaagcggaaagaacgacggagggacgaacggcggaaaagatacgctgatcatcggcagaggaggtgattcgacatcgcttgatccgatcacaacgacagaaggcgaagcgtttaaagtgacgatcaatatgtttgagaccttgctgaattacggggaacaagacacaacgctgaaggaaggcctcgcggtgaaatgggacgcttcagatgacggtttgacctacacattggagctgagaaaaggcgtgaaattccatgatggaacggattttaatgcagaagccgtcaaatacaattttgagcggtggatgaacggggatgaagaaaaatttccttactacggcatgttcggaggctataagaaagatgaggggcacgtcatcaaagacataaaagttctcgacgaccataagattcagttcattttaaaacgcccgcaagcgccgtttttaaagaaccttgccatgacttctttcgggattgcaagtcctgccgccattgaaaaatacggcgaaaaattcagggagcaccccgtcggcactggcccttacaaatttgtcgaatggaagccgaacgaccggatcgtccttgagaaaaatgaagactattgggatcaaggcaaaccgaaattgcagaagatcattttcagagccattcctgaaaactcagcccgcttaaatgcattgaagacgggcgaaatcgacctaatggatggcgtcaatccgtctgatatcgaaagcatcaaagcagacgccaatctgaaaatatttgaaaggccttcaatgaacgtcgggtatctcggaatgacaacgacgagaaagccatttgacaataagctggtccgccaggcgctgaaccatgctgtcgataaacaggcgattatcgactccttctacggaggtctcgctgaatctgcaaaaaacccgcttcctccgtcgctcgaagggtacaacgaccaggttaaggaatatccgtatgatttaaaaaaggcaaaagaactcttaaaagaagccggctacccggacgggtttaaaatgaagctttgggcaatgccggtaccgcggccgtatatgccggacggtatgaaaatagccgaagtgattcaatcaagctttgaaaaaatcggagtcaaagcggaaatcgtcacttacgactgggcgacgtacttggataaggtgagcaaaggggaagctgatgcgtttttaatgggctggaccggcgacaacggagatccggacaacttcatttatacgctgcttgataaagataatatcggcggtaacaactatacgtacttcagcaatgatgagcttcatgacatcttaatcgaggcgcagtcagaccctgatcaaaagaaaagaaataaactgtatcaagatgcgcaggagctcctccatgaagaatcgccttgggttccgcttgtccattccacgccgattttggccggttcaaaagatatcgacggatatgttccgcacccgacagggagtgaagtattgtccggcgtagagtttaaataggtggtgacagccattgcttgcgtactgtttaaaacggacggccatgctgatccccgttctcatcggcatgacattggtcgttttttcgatcatccgctttattcccggcaaccccgcccaggttattctcggccagagggcgacaaaggaagcggtgcagcagctgaccgtccagctcggccttgatcagccgtggtatatgcaatatgccagatatataggggatttgctgaaaggggatctcgggacatcaatccgcacgggagcggcgattacgcaagaaataaagccatatttgttcgccactctcgaacttgcctttttcgcgatgctgatcgcagtgtttgtcggcgtgaatgccggaatcatcagcgcgtggtttaagaactcggtattcgactatatcgcgatgctggtggctttaatcggcgtgtcgatgccgattttttggctcggtttgatgggccagtggtttttttcgatcgagctcggctggctgccgacaacaggaagggagaatgtcagaaatccggtcgaagccattacgtacattcatacattggacacccttttgcacggaagatttgatcagtttgcagaagccatccgccatttaattctgccgggaacggctcttgccaccattcccgcagcgatcattgcgagaattacgagagccagcatgatagaggtgctgcagtccgattatatccgcacggcaaaagcaaaaggcgtgcatatgtttttcgtcatctataagcacggtttaaaaaatgcattcattccggtattgaccgtcatcggcctgcaaaccggactgttactgggcggcgcaattttaacagagactatttttgcctggcccggcatcggccggtacatttatgatgcgatcagctaccgcgactacccggttatccaatcgggcatcctcgtgatcgccttcatcttcgtcatgattaacttcatcgttgatctgctgtacgccgtcatcgatccgagaattaaatattaggaggcgggaaacatggttgtgcttcaaaatgaacagcagagggaggacgtgaaggtgcgttcgcctttggcggaacatattcggcggttttttgagcataaattggctgccgccggcacgattctagtcgcgctgtttatcctgctagccatcttcgcgccgctcatcgcaccatacggaataaacgaccagtcactgtcagacaggctcgccgctccgtctgcggaacacctttttggcacggatgactttggcagggatattttctctagggtgctttacggcgcaaggctgtctttatgggtcggctttttctcctgtttggcatcggccttggcggggacgctgctagggctgatcgccggtttttacggcagatgggctgatgcattgatttcacggctgtttgatatcatgctcgcgtttccgagcattctgctggcgatcgccattgtagcgattctggggccttctcttgaaaatgccctgattgccatcgccatcatcaacgttccgacgtttggcaggctcgttcgttcaaaagtgctcagcatcaggcaggaggagtatatcttatcagcgcgtgctgtcgggatgtccaatataaggctgatgtttaaacacattctccccaacagcatggccccggttatcgttcaagcgacgctgaatattggaaccgcgattatagaagcggccgcgctcggatttttagggttgggggcgcaggcgccgaaccccgagtggggaaaaatgcttgcggatgccaggccttacttggcgcaggctccatggacattgttttttccgggatttgcgatcatgctgaccgttctcggctttaatctgatgggagacggcctgcgcgacacccttgatccgaaaatgaaggaaggaaaataaaaaaccggttaacatattctttaaccggtttattcttcctcaacttcaagctcgctgtcttttttgtggtacgtctgaaagcttgagagcaaggtttccaaatgctcaagctgttctcggtattctacagtgctcgccataatggtcagcatattgtagtccaacagttcttcttttaatttgtcctggtttttcaggaatgattcggtcaagtgctgtttgtacacgtctccttcttcgtgcaggtcgacgtgatcctgcgttttgatcctgccgacgaatctcattaaaattcgttcgtgccaatggaggagataatcgagctcttcgaccagcgtttcttgaaattcttcaggcatgtgataaaactcgttttcaagccggtgcagctttttcagggcatcaagcgcacggttggatgcaatgatcgcctgtctgaacagcacgagctttcgctgttttacatatgtggaacgttttaaatagcttctttcttctttgtagagcaagtaaaggtggtcaaccttcatcattttttctttcagtttttcaatgtcttctttcagcatggaatgttccgttgtcttccgcgtcaacaatctgatccatttaatgacttcatctgtattttcaacaatatggctgacgagcttcgtttcatatttaggcggcagaaaaatcaggttgaccaagaacgcagacaacacgcccaaaataaccgttccggttctcaccaaagcaaaccataaaaagttgtcgccggagctctccagtatggcaataacggtgacaagagcgatcgaaatcgtgttctcgatcttcagcttcaagttgatcgtaatgacgattaccgccgtcaatccgatgatgatcggactgggttcaaaaataagtccaaaaataatggctgtggctgctccgataatgttcgcctgcacttgatcgacaatcgtcaaaaatgaacgatagatcgaaggctggatcgcgaagatagccgcgattcccgcgaagacaggagtcggaaggccgagccaagacgcgaggtaaagcgcaagcgtaatggcaatgcctgttttgaaaatacgggcaccaagtttcattaggctgtacttgcatccctttctataataaaattcgttctttacagaaaatgaattgtagtgaacattccctctctgttaatttgccaaacaataaagtaatatacagcgatcttccgaaatattcaacccatttttaagaaaaaacaaatcattgacaaaaaagaaagacaagccggcggaaagtgcctgttcaccgcgctttcaaagtgctccgcatttgataaaaaagagagcggatccgctctctttttacatgcgctgtttcaattgtttaaatgagtcatccacggctttgagcgtatctttaatgtcctcttccgtgtgcgcggtggtgataaaccatgcttcatattttgaaggcgcaagattgattccgcgctcaagcatcagtttgaaaaaggccgcgaacatgtctccgtccgtattttcggcttgctcatagttttcgactttttcgttcgtgaagtatacggtgagcgcgccttttagacggttgacagtgatgtcgatgccgtgggtctcggcatgtgccaggatgccttcttcaagcatggcgccgaggcggtcaagtttttcgtatgtgcctttttctttcagcacttcaaggcaggcgatgccagagaggatggaagccggattccccgccatcgtgcccgcttgataagcaggtccgagcggtgcgacttgttccataatctcttttctgcctccgtaggcgccgatcggcaggccgccgccgatgattttgccgagcgccgtcaaatcaggtttgacgccaagaagatcctgggcgccgccgtacataaagcggaaagcggtaatgacttcatcgtagatgaccagggctcccgccttatgtgtcagttcattgacctgctcgaggaatccgctcttcggttcgacgatcccgaagtttccgacaatcggttcaacgaggactgccgcaatatcgttcccccatttatcgagcgcttctttatagctgtcgatatcattgaaaggaacggtaatcacctcgttggcgatgctttttggaaccccggcggaatcaggcgtgccgagcgttgacggtcctgaaccggccgccaccagcacaagatcggaatggccgtggtagcagccggcgaacttgatgattttcgttctgcctgtataggcccgggcgacgcgaatcgtcgtcatcacagcttccgttcccgaattgacgaatctcactttatccaaggcaggaatcgcttccttaagcatcttggcaaatgtcacttcatgctttgtcggcgtaccgtaaagcaccccgttctcagcagctgtttgaatcgctttcgtgatatgcgggtgggcgtggcccgtaataatcggtccgtacgcggcaaggtagtctatgtatttgttgccgtccacatcccaaaaataagcgccgcttcccctttccatcgcgacgggagaacctccgccgaccgctttgtaagaccttgaggggctgttgacgcctccgactatatgttgaagagcttcttcatgaagcttttcagattgagtatgctgcataatatcctcctcatttttgcacctttatctatttctatattttctatattgtaacacgaggcggacagagcgcaaaaaagaagccgccgaacatttgaacaagagggcgctgttttttataatgggggaaagcaagcgattaaacataacaggaggcaaaacaatgactgttgaaattggacaaaaggtgcctgatattgaactgctgggcgatcacggagaaaaagtaaagctgtcggattttgaaggaaagtatgtcgtgctctatttttacccgaaagatatgacgccgggatgcacaacggaagcgtgcgatttcagagaccgtcatgaaagctttgcggaacttgatgccgtcattatcggagtcagccccgacgatcaggcaaggcatgaaaaattcaagcaaaaacacgatctgccgtttctgctgctcgtcgatgatgaacacaagctcgctgaaagctttgacgtatggaagctgaagaagaatttcggcaaggaatacatgggtgtcgaacggtcgacattcctgattgataaagaaggccgccttgtgaaagagtggcggaaagtaaaggtaaaagaccatgtcgcagaagcgcttcaagcagtaaaagaaatcgcggaagcataaagctcgctggggaggccggactgtattttagtttggtctctttttacgctcatattcgcctgtctgatcggccatgctgatcatagcggcatttttcgccttaaaaatagctttttcacagggattggaattgacaaagattctgatcaggagttacactaattataaacgttataatgtaagaattttttttagaagagaggtgcatgacgatggctgaacataacctgaaagaagcgttggaagcgttgaaggaaaccggggtgcgaattactcctcaacgtcatgccattctggaatttctcgtgaattctatgtctcatccaactgcagatgatatatataaagctctggaagggaaatttccaaacatgagcgtagcaacggtctacaacaatttgcgggtttttaaggaatcagggctcgttaaggaattaacgtacggagattcctccagccggtttgacttcgtgacttccgagcattatcacgcaatttgcgaacgctgcgggaaaatcgtcgactttcattatcccggcctcgacgaagtggagcagcttgcttcacatgtgacaggatttaaagtcagtcaccatagactggagatatacggtttatgtcaggaatgcgacaaaaaagaaagccattaaaaagagctggccgcttttttaacggtcagcttatttttgttgcagcatttactgagactttcgattatacgattcgttaaactcttttccttcgaggtttttgtccaatgtcaaaggctccctgcaatgcatgcacatatcaacccggcctaaaatcttggtcggtttttcacagtttggacagacgacttgaaccgctttcgttgaaagcatgccgatccaaaaataaaccgctgtgctcaacaagatagacaatacccccaagatcataaacatcgacatcaagaggaccgaggacctaaaaaagaccccgacatacataataatgaagcctataaatacaaggctcaacgcaaacgttctgattttgttgattttactagagtatttggccatatccatccccctgtctctaatatagcatatcaaagatgtgttattctttaattaaaacgaatcaattggaaaatttctatagagagttttggggaaattgattataataattcaatgtgttttcaaaataaaggagtttttattggctcgtagaaataggtagaaacaagagagaagcttttatgcaacgtatttacatcgtattggaggaatggtgatggaaaatcttctccgtccgatttaccaagaaagagcaagccgccctgacacactcgctgtcatgctgattgagaggagaaatcaaacttcatctgcaacagataattttgatgcggcattgttgattatcgttaataaggctgaagaccctgtattcgtgaagcattatgagttcgacggaaaaacggcttctcttcatattatttctgttgaacagcttcaggaatggattctgcttggaacaaacaggagaatcatagactgggttctcaatggaaaggtgcttttcgaccgaaacgaatttatcgccaagctgattgagcagctcaatacatttccgttttcagaaagaaaactaaaaatcggacttgaatacgggaaattaatcagaagatatatagaaggaaaatcgttttttgaggacggtcaatttttggatgcctacaattccatcgtacacgccctccaccatttggccagaatcgaagtgatcgataaggggtttcaccctgaagttacggtatggaaccaagtccgccacatggaacctcaggtttataaattgtataaggaattaattgaaagcaatgaaagcttgcaaaaacggctggagttattattcctcgcaagcgattttctcattcattcaaaagccgaaataggggctgcctatattctcaatgtcatggatgaaaaatcggtttggcaatttgccgaacttcttaaacatccggatctcaagtatttcacgacagacctgggagttatactggagttcttggctgaaaaggatttagtcggagtaaagccgatagagacaaagggccaaaagatttttcaccgaggatattttattaaaaaaagtgttgacactaatttataacggtgatatattattaagcgtcgctgttagcggaacggtttttgaacagaaagcagcagcgacgaaaaatcaaaaaaacatttgacacttctcgttgaaaatgttatactaataaagtcgcttcggacagacttgtttcagacaagtcttttttttgtgtgcaaacgaacccaaaaaaaggataaattattatataattgttaaataaaaaaattgctctgtcaatcgggattttgatttagtaaaatattaagaaaggagggagcaccatctctaagcttttttgtctagatcacagtaaaatcaagcaaagaatgaatcattttatagaccttgagattcccaatgcggacttaaatcggacgctgcacgcttttctagatgcaaaggaccagttgcatttcagcgagcttgctttttatcattaccaaagtttcggcggcacggacaccgatgcggcagaaacccttggagcaggcattgaactcttgattcttgcgtttgatatattcgatgatttagaggatgaagacagccccgatgaaccttggatgaaaatcaaccgttcagtcgcaatgaatgcggcgactgcgctttatacaataagcattaaagtgatcggttcggtgtcgaacgattcttgcttttttaataaaatgatggaatacatattgcaatcttcacaagggcaacatgatgatcttagtgataagccggttacggaaaacgaatgccttgatatgatcaagcgcaaatctggttcattgacagctctttcatgtgttttgggaaccatgctcgctacaggtaaatttaatcctactgttgaatcttatgcactccaattgggcattgctttacagatcgaaaatgattatagaggtcttttctataattcaaaaagcgatattgtgaaaaataagcgaacacttgcttatttatacttgaaaagaaaatttaatcaatcctcaattgatttattaaaagtatttgaaaatgaggataaaattgccgatatagaaataaaatgttataaagaaaaattgaaggaagctggtgttccccaatatatgtatgtcatgattcagcttgctattcagaaatttagaagaggaatagctgagttagagctgaaacaagaggaaaagaaatggcttgcttctttccttttgaacaagtttgataaggaggattaaaataaaacgtgcaggatattgtaaattttttagttcagcatccagaagttttagaacaggttataaaaggaaatgccagtttgattgggctggataaagatcaattaataagtataacggaaggttttaaagaatgggaatctattggaagaagagttcctgtctggggataaataaaaaaatagggcgttctaaatgaaattttcattgaagttagtgtcagtaactcttgtggtgattacctgtatatatactttctttgttatatatctatgttataacaacatgtttgtaggtgcatacttagcctacaattcgaaaaaccagctagttgtggattatgttgaggaagattccttagccgattatacgggtttaaaagctggagatatcattcttgaggttaataatgagaagccgtctaagaaggaaccaaaaaataaaattctagcagatgtccgttcactttctattgagagaaatggaaaaatcattacaactgatacaagggatactattattagttatgatgttttatttactgttttaatcccggttgtattttatttattatgcatgttttgtgtgtttttgattttaaaatctaacaagacgaataaacaaatgtcttcatttttgctaatttcatttttaatcataatttcactggcttatgtaagtgtcggtggagtttcaagaggtgataaatttagccgatatctgaatttgttaacctttctatcagtacctgctagttattatcactttatacttcaatatttcaaagaaattggcaaaaaattctttagcaataaaatattgttgctctatgctttacctttcttgaatatcgttttagaaattttttatgaccttactgattttcttgaggaaggtaggccatatgtcaatttgttttcgttctttataggaattgttttagttttcggagttattatttacggtttaattaaatataagcattcagaggaaatttatttcttgaaaatgcttatgttaggaaatttccttggtgtttttccttttgtagtattctttgttcttccaattttaattattggggattatatttattccgccgcagtagtagctccatgtctattgatcattccgttttctttagtttatcaattcatatctaataaaacttatgatgtggagtttttggttggaagattaaaatactatggcctattggcgattattccaacaattatgttgatatctgctttcaagctaataaagtatcaaactggggactactatgatctaagattcacaatctatatctacctggtcatgctcggtgttttttaccttaaagaaatccttgattatcgcttccgtctgaaacgtttttcagagaagtataactaccaagacagtatatttaagttcacacaaacgattcgaacacactcatctttaaatcaggttttgttggaattgaaacaaacaattcttgatgttttgattgtcagccaagcccatgttctgaaagtcaaaagcgacggaacaatatctttgctcgaagaagatgccaaagaatatccgtggatcccctacgaacaagaagtaaccaaggtgatcaccgacatcggcaaaatcgtcgaagtcgaccgcggatttttgattaagatcggtgaacggggcgggacgtcttatgtcatgctgtgtttgtcggttttaaatacgcctaggctgacgcgcgatgagatttcatggcttgagacgctggcgttttatacgagcgtttccctggaaaacgtgctgaaaatcggcgagctgatggagcatctggaaaatgtgaaaaaagaagggccgaatccggcgtggctgaataaattgatgtttgcgattgaagagaagcagagatctgatttagcccgcgatctccacgactctgtcctgcaggatatgatttccttgaagcatcaaagcgagatgtttctggctgattttgaaaaagataaagcctgtacgaatcaaatccggcaaaggctcatcaatatgaatgagcaaatgtccgccgtcatccagacgacaagggaaacgtgccaagagctgaggccgcagctgttgtacgatctcggacttgtcaaagccctttcgaaactggcggcgcagcatcaggagtcctcatcgatcgataagatccgcctcaatacggaaaggttctcaaaggtgctcgacttggacacgcagttgaatttgtacagaattgtgcaggagcttttaagcaatgcggttaaacattcgagagctaatgaggttttgattatgcttgtctgcataaaagaaaaagttgttcttcattatgaagatgacggcattggggttgacccggacaagctttatcaaaacagcgcaagcatggagctgtcgggcattcgcgagcgcgtccgcgcactgaacggcagtctggatatacagacagcagaagggaaaggctttagggtcgccattgaaatgggattgtaatgtttagttaacatttttgcttggcatccgccaagttttttctataaaatggtgatagggcaaggttacgcaaaagggaggaaattatgagaagattacttgtgatcgatgatcatccggctgtcatggaggggacgaaggcaattcttgaaacgaaccaggactttgttgtcgattgcctcagccctgaagccagcgaacaatttctcaagaaacatgatttttctgcgtatgacctgatcttaatggatttaaatttgggtgaaatcaacggcatggacctatctaagaaaatccttgagacatgttcatcatgcaaaattatcgtttacacaggctatgaagtcgaagattattttgaagaggcgattcgttccggcatgcacggcgccatcagcaaaacggaatcgaaggaaaagattatagagtacatatatcaggttctggataataaaattgtcgtcgattatgattatttcaagcagttgattacacagcaaaaatcgaagtcaaacagccagcagacccagcacgacctcttgactgaaagggaatgcctgattttaaaagaagtcgaaaaaggctacacaaatcaggaaattgctgatgcgcttcatttaagcaagcggtcgatcgaatacagcttgacttccgtattcagcaagctgaatgtaggatcaaggacagaggctgttttaatcgcgaaatctgaaggtgtactctgatgaggggacgattgtgatggaaacgaaacatacacttcttgaagcgttgggaatcgagttgaaggagtgcagcaaagaacggtgtgttgccgtcatgcctgtcgatgaaagaacgcgtcagcctttcggctatctgcacggaggcgcgtccgttgcgctcgctgaaacggtggcaagcatcggggcatatcagcatatcgatccaaaagagcaggcatgcttcgggcttgagatcaacgccaaccatattaaatcggtaaaagacggaacggttaaagcggtcgctacgcctctgcatgtgggcaaatcaacaatggtgtttcaaattgaaatacgcgatgagcaggacagcctgatttgcacgtccaggtgcacgatggcggtcatcagccgtccttcatcgtaaacataaagaaaactcgcctgttaggggcgagttttctttttataaataggaatcttccttctttttaatcagaaaatttctgtagccttcataatcgtcctgtacggttttcttttccattttaacgcctgtattatacgcggctcttgcgatcaggtgcgcgcctacaggagacgtcagaaatacaaagacgataccgagcagcacttttgccgtaatgaagccgtgcagaaaccagaagtaaaagaatacgccgagcagcacgctgatgatccccagtgtcgctccttttgaagcggcgtggattcttgagtataagtcaggcagcctaagcgttccaaaggaagcggctaacgatatcagtgcgccaagaaggatcaaaacggcgataagcaatttagcggcttcgatcattttcgataatctctcctttctcaaggaatttagaaaatgcgacggtgccgatgaaggccagaatgccgatcaagaggatgacttccaaatatgctgtcgtatttaacaggatggacacgagagccgtaattccgattaagttgatgccgatcgcatcaagcgccaccactctgtccgggatgctcggccctttaatgaccctcaggacatacagaaaagtggagaccgccaaaatgccgagtgacaattgcaaaataaattcaaacatcagcggcttacctccttaatggcctcttcaaacgaaatgcggatatcactgatggctttctcggcatcatcgatatcgaccgcatgaatataaagaatcgaacggtcatcggagatatcgacgaccaatgtgcccggtgtcagcgtaatcaggtttgccaacgtcgtgatttcccagtccgctttaagatctgtcttgaaggcgaaaatgccgggcttattttttaaccgcggtgacaagatcgtctttaatacgctgacgtttgccagcacgagctctttaataaaaataaacagcagtctgacgatcgcccaaatgttaatcaagtaaaagcggcggcggaaaaaacgcctcatcagaaagagcgagaataatccgatcacataaccgatgacaaacccggcagcggtgtagtcattgttcagaaacatccagcacaacgcaagaataaagttcaacaatatttgtaatgccatgcgatctactccttcaaaacggcttcaatatatttttcggggttgacgagcgtatcagccgcctggtgaaaatacggagcgataagctcggttccgagtccgatggcaagcgacagaaagagcagtaccgctgccggatacatgtagccttttagctgccttttggccggagcatcttcctgttcatccccccagaagccgttgataaatattttcatgacggaatacaagacgagcaggctggataaaagcatcagcagcgtaatcacgaattcgccgcttaaaaagccgccttctgcaattttcagcttgccgatgaatccgctgaaaggaggaacacctgccaatgaaacggctgaaatcataaacatccagccgagcacgggatggtttttgatcaggccgctcatttttttcaggttgtttgtccctgtcagggcaaaaagcgctccgccaagcataaacagcgctcctttaatgatcatgtcatgaatcaaatagtagacagatccttcgattgaagccggcgtattggcggcgatgccgaacaagatgacgccgaccgcagtgacaatattgtagatgatgattttttgaacatcccagtaggcgatcgagccgatgaccccgaagatgatcgtaagcgccgcaagccagaccattaattgatgagtaaaagcggcgtcttgggtgaaaattaatgtaaacacccttgtgatcgcgtacaggccgactttggtcagaagtgcgccaaacagtgcggaaacagcggctggcggcgcataataggaaccaggcatccagaaatacagcgggaagatgccgccttttaaaccgaagacgatcaaaaataaaacagcgatgaccgtgatcagcccggtttgccctgattcgctgatccggacgctcagatccgccatgtttaatgtgcccgtaaccgcatataaataagcgactccgatgacaaagagggcggaagaaataatgttaaagacgatgtacttcagagactcccgcagctgaatcttcgtgccgccgatgacgatcagcacatacgaagccatcagaagcacctcaaaaaatacgaacaggttaaacaagtccccggtcaagaaagcgccgctaactccggcaagcaggaactggacggcgggataataaaagaaacgctcgcgtttttcgccgatggagcgaaacgaataaagaaccgtcagaaatccgataatggctgtcgttaacgccagaaggctggcaaattgatcagcgacaaggctgattccgaacggaggcttccacccgccgagatacaaggtctggattccgtccgtatagactgtctgcacaagaacggcggccgcagcgatcgccgcaatggaagatatggcgctgaatgcacgcatcagcacgatcgacctgttcataaagataagcagaattgcggccattaaaggaatcagtattggcagaattacaagattattcatgttgatcatttcccctcatttgatccatatcatccattttcagctcttgataggcgcggaaagccatgaccaggagaaacgaggtaaccccgaaagcaatgacgatcgccgttaaaatcaacgcctgagggagaggatcgacataggttgtcgactcttcattcaaaatggggggcgctcctttttttaaccctcccatcgtcagcaaaagcagatggacgccatggctgagaacggcagttccgataatcaccctcaaaaggcttttggaaagcagcagataagtcgccgccatgaacagaattcctacaataaaagacattaaaatctccattattctctctccccaatcgtctgaataatggtcatggtcacgccgaccactacgagataaaccccgatatcaaacaataccgcggtggcaagctccgttttccccaagagcggaaggttaaagtaatcaaacgcgtgggaaagaaactgagcgccgaacaaaaatgagccgattccggtggaaacggaaatgaataagccgacggccgccacatagataaagttgacgggcaagatgttctgcaccgtttttaaatcataggcgagcagcagaaggacaagcgaagacgccgtcatcaatccgccgataaaaccgccgcccgggttattatggccggcaaaaaacagatggaaagaaaagagcagaatgataaaggatgcaatctttgtaacggtttgcaggatcacatcattcgtctgaacctttttcaatgctcttcccctcctttctccaatctgagcctgatcatgccgtatattcctaaagcggcaatgacaagtacggtaatttcaaacaatgtatcaaatcccctgaagtcgaccaatattacgttgacgatattgtggccgcctgcgagtttatagctgttttcaataaaatacgatgcaatgctttcaagcgagcgctggctgtttgctgaaagtgcgagcagcgtcacaacagttccgacgccgaccgatacaagcgcatttgtgaccctgaacctagccgatttcggcttaaatctgagcttcggcaaatgatagaagcacagcaggaacaatgcgactgaaatggtttcgatgatcagctgcgtcagcgcgagatccggcgccctgaaaatgacaaagaacagcgcgagcgtgtagccgatgacgccgagtccgataatcgccgtcagtcttgaccttgcaaaaacggtggtaaaggttgcggcaatcattacggctgacagaacgagctcatagacgccgattgaagcattgcctttcacatcgtatgaaaagcccccggtaacagcgagcgatccgccgatgatcacgataaagaagacaaaaacataaacaagatagtcacggagaaaccctgtcatatacgttcttgtaatcttgttggagcctttttcaagccctgacagcgagctgtcgtacaacttgttcagcgtcagtgtttccgggaagaggccgtagaccttccgccattttgacaaggtcaaataggcgagaactccgagagcaacgacgccgatcgtcatatagagctcagtcgaaaagccgtgccacatgtaaatatgaaccttgaatttttcgtctccgtccaaaagggtcggcataatcgacgctgcagcaggttcaatgatgctgtatgacagaatgttcgggaaaaagaaaaaaatcaccacgagagatacgaggacaatcggcgaaatcagcatgccgattggagcctcatgcgcttgtttttcaagcttttcaggctgatattttcccccgaaggttttaaataagagaaccatgcagtaaatgaatgtaaacacgcttccgatccaagccagcacaggaaagagaaaaccccatgtgtcagcgttatacaagttaaagttcgtaatcctgagcatgctggtgaagaacatttccttgctcaaaaagccgttgaacggaggcagtccggccattgaaaacgcgccgatgagcgtaatcgtaaacgtaatcggcatgatcgtcataaggccgccgagcttgcggatatctctcgtacctgtttcatggtcgatgattccgactgccatgaataagctgcctttgaaagtcgcatggttaatcaagtgaaagatagcggcgattactgcaaccatgtagtattcaaaatgctgaaaatgcagtgcggccgctccgacgccaagcatcgacatgatcattccgagctggctgaccgtagaaaatgcaagtatcgatttcagatcagtctgcttgacggcgttgaacgaaccccagaaaagcgtgacaatccccgtgagagacacgatccaaaaccattcccctgaaaaagcgaacacaggggtgaatcttgcaacgatataaattcccgcttttaccatcgtggcggagtgcaggtaagcacttacaggcgttggtgcttccattgcgtccggaagccagatgtaaaaagggaactgcgcagatttagtgaaggctccgattaacaccagcacgagagccgggatgaaaaagccgtgccccgaaattaaatcaacctggttgatcatttctctaatcgagaatgaacctgtgatcgtgtaaagaagaatgaagcctccaagcatggaaagaccgccgaatatggtgataagcatcgattttgtcgcgccgtatcttgatttttcccgcttgtaccaatagccgatgagcagaaaagacgatatgctggtcaattcccaaaacaaataaagtacaatgacgttatcaacgagaacaacgccgagcattgcccccatgaacatgagcagataaacgtaaaatggtccgagctgctctctttctttagacagataatagatgctgtaaaggacaaccaaagacccgatccctgtaatcagaagggcgaatagcaatccgagtccgtcaacgtacgcggtaaagttaatcccaaaggacggaatccattccagtacagcctttaatgttccgccatccgccgtcattttgatcatgcggaaaaaataaataaataatagaacaggaagaaacaggacaaaccagcctgtatgaatctttctgacgtttttcgccaatagcggaatcaagaaggcgagtgcaaaaggcgataaaatagcaatatgtaaagacgtcatattaacctcccttaaggtagcatgtataaatacattctgttccatactaaaattttcaaacgttatgtactttttgtagaactggtgacctagacaaattataactcaaatttaaatcggctgcatgatctcatggtaaccgcggtttatgcggtcttatgaacctgaaaacaatcttaacaaaaaattcggcatttgtataatggaaagtttttttgaacaagatgaatttgaggtgatgaaagatgaaaaggaaagcttttgtcagcctaagtttattttgttcgctttttgcgggagcgtttatgatcaacagggaaatgacgcgtgaacagactccggggatcggaacacccgaaggccctcaataccgcggtgattacacgccgctacagacgggagcggaagatcagtccttaacgggaacagaaagagctccctttaaaccgagagaatatatcagagttgagaaacgctgaaaacaaaaaaggaatccgatcgtatagatcagactcctttttgtttttttatgcggcccttacgaggtgaagaacctcagtaaaacggtcgccataatgacggtggatgccccgccgagacgcgttgagatttgcgcaaacggcatcagacccatccggcctgaagccgaaagaatggccacgtcccccgtgccgccgagaccgctgtgacagcctgtgacgatcgctgattcaacagggtacatgttcattaattttccgacaaagtagcctgatgtcaccatggcaatgacgactgaagcgcagacggcgatgaagcgcagggaaataacagacgccacatcatcaagagggatataaagaatgccgagcccgaccatcagcggccaagtgaagcttgatgacatgaacttgtaaagctggtgagcgcctttttccatgcttgcaggcagaagccttgcatattttacggcagccgctgcgatgatcatcaggatcgctcccggaatcgcgatgaacttggagaccaaaccgccgaaaatgaagaaggaacatgcgattaaaacgccggcacccattaatttcaagtcgattttcggctcctcttctttttggttgaaaatttcatcgtcttttttcgatttaacgagtctgccgttaccgttcagttcaggacgcttttccccaagctttttcatcagtccggctgagatgatggcaacgacgtttccgataatagcggccggaatgagctgtgaaacaaatacatcggtggactgtcccaaaatttgcgagtaggcgagtgacagcggcaggatgccttcgccgatgcctccggcaataatcggtacaataataaagaagaaagcttcataagggctgtagccaaataacagaccgacgagaataccggcggcaaccgctgcgatcgtcccggccaacaacggaacgaacattctcataaaaccttgaatcagaaccgtgcgatgcattcctaaaatacttcccgcgactaaacatgcgatgtagaaatacaagaaatttgacgttttcatcaaagttgtaaccgcttccatagatgcagggttaagcactttgaaaaagactaagaacgaaggaacaaacagcgatagaatggcaggtccgccgatatcttttaaaatcggaatgcgctgtccgacatccccgagaaaaatgccgagaatcataatgaccgcgaaaccgccgagcatgtcattcggcaattcattaaagtaagctgccagaaaaacaatcagcgcaagcgcaatatatagcggaaacggaatcacgccgattttccagttgatcagcttatggaaaatatttttattttctttatgaccgtgatttgtaatcggtttcaaatcttttgctgcttccataaaaaacacccccatgtttgtatgtgttcaattgtagaagaaaagtgtcaattctgtgcgttttttaaattaaaataattgattgataattaaattaaaacgaaaaagggcggaaaaagagaaggaatctccttgattttgatcgttttataggtcttttggtttattagggatccatatccaggcggaaaaaggggatttcctgtccatggagaaaagcttttttaagcagcaattaaaaaacccccgaagcgcatttcgggggcggtgcattatgatgttcttttggcaagagatcctaacacctctcccattttgacttgaagagaggggtgaaggcgttcatcaggaataaaggtatccttttcaaacagcagaataacggttgagccgaaagagaaatatgcgatttcgtctcctcggcgccattcttttgactcctggagcatcacgatcgagttaatatacatcgctccgaccttcacaagcagggcggacccatattgatgcttaaattcggaaatcatccggtagttttttgtcagcggcgatttcccgtatgtcaaaccgattttattcacagggtaagacgtgcttcccagcgaatactgcgtttcaagtgtgccgtaagccgggctgtgaattctgtggtagtctctcggacttaaatagataatgatataggttccgccgacatagcggttcacgatctcggatcgtccgatcatttcttctacagaatagagtttttgtttgacggtaaattgcttgtcgcgcgtgatggtgcccatttcttcgatgacgccgtccacagggctgaccaggctgtttggatcagcgggaagggggcgtgcaccgctctttaattttctgatgaacagctcgtgcaggctgttaaaagagcggacatcttccagcatctcttctgtattaatatgaaaggttttgatataggaggggatgagaggtttgcttagctttgactgagcaaacttttccagcatccgggacacgccctttttattcgtcaactcaatcaaaaaccggtaaagccgctttttcaagctgttcactcctttactgatcatccgggatgcaagcggtatttaaatcacgccgattgtgtatccgatcgtaataaaaacaagacaccaaataaaagctcctgatccggcataaatcaggaaccttttcatgtccatctcgttcatgccggacagatagcatgtcacatggcggattccggggacaaaatagccgaaaagaatcgtccacgggccgtatttttcaaaccagcggtgcacggtgtccagtcttttcggcgtcagaccgatccatttcccgaacttatcgagcagcggtttaccgatttttttccctagaaaataactgatgagcatccctgatatcgcacctgaaaaactgatcaaaaggcacagctcatagtttaatatatgaatagaagacagatacccgacaaatgtcatcatgacttcatcgggtatcggcaggcctacaattccgaggacaagcatcccgaatatcgcgaaatacccgtattgggaaatcaattcttttgccaactccattaaaaactagctcactttcttcaatagttttttccccttcaggctgatgactttgattttgctgaccatgagaaaggacaggaacagcatgatcaaaatgaacggctttttgcccaggatttctgagaaaaggtttaagcataccagaatcgttccggctgcggtgatcggaaggcctgtaaaataatcctggttctctgattgaatattaaatcgcgccagccgaagcgctccgcaaacagggaataacaatgtcgaaggaaggcctaagatcggagcatcataaaaaacgattgaataggtgatgatggccggggcgactccgaaagtgataatatcagacaaagaatctaattcttttccaaacgggctgacggcatttaatctgcgcgcggccatgccgtcaaggctgtccaagatagcgccgatcagaacaaatataatggctaagaataaataccctctgaatgcaagcagtattgaagagatgcccgaaacaaagtttccaaccgtaattaaagaaggtatgactgatttattcaatgttttcgcatcctttaaataaaaacgttttatatagaaattaaacaatattaaattgtatacgatttgcttcctgtctgcaataaaattcctgtaatgattgataaccagactttttcatcataccataaaagtggtaaagacaatggcggcgtcaaaaaattttatcttttgttaaggtaacaaaaaaagaataagagagcaggccgctctcttattctatcgttcggttatcgttttcctttaatataagggataccgtttgcctttggcgcttcggctctgccgctaaatccggccagcgctagaatcgtcaatacgtaaggcgcaatcagcatatagacgtttggtatttcttttgaagaagggaagcgtgaacccgatgatgcttaagctttgagcgaagctgaagaacagggctccgatcggctgccatttaccgaacacaagcgcggcgagcgcgataaatccttgtccggcaatgatggcgagtcaaatgtggccgttacaaaaaaaacgcccgctgtctttagagagcagcgggcggggacatgttatagatattggttaatcacattcaagtcatttgtatttaatttatattggaaaaccggcctgccgatcgtcccgtaggccatctctacgttgagaacttcgatttcctccagaaactttaagtatttgcggattgaaacttgagagatttccgtgtgattggccaaatcttccgttgtgaacgtcaagctgtcaaacgatctgatgcttgaccaaatgagcttcagcgtgcttttggtcagcccttttggcaaatgtaccttttcgggcgcgcgttttttttgaaaaagttcaaaatccagctctttttggctgatattccggttgctagcatagagctgctgcttccgtttgtaatcagtgagcgcgctttgaaaccgctcaaattcgaacggcttgattaagtaatcgacggccccgaaccgcagcgttttttgaacaacatccatttcactggccgctgagatgacgatcacgtcgacagcttgattttggcgtctgatctcagtgagcagttcgacgccgttcctgccaggcatataaatgtcgagcaggatcagatcgatatgctcttcccggaggaaggtgagagcctcttgaaaagaagcggcaatgcccttcagctgaaatccctctacttggctgaggtaacgtttattcagctctcttaccatcgggtcgtcttcaacaattaatacatcaatcatggtcatcctcctttggttcatacggaatgcggagactgaatgtcgttccttcattcttttcgctcgtcacgacgatatgtccatttaaattttcaaggctttgttcgacgaaataaagaccgaacccccgattggggccctttgttgaaaagccttggtcaaacattttctgctgttcctccttggatatgccgactcccgtatccgtgacttcaatatcaagctgtccgtcatgatggcggaatgaaatcgaaatatttttcttctcagtggcggaaacggcatcaagggcattgttgagaaggttcccgataacggtgatcaaatcgtgaatcaccgctgtgttggctgtatccggaatcctcgtgctgcaatgaacctccaacgaggccccctgttcccgaatatagctctgtttgccgagcaaaaagccggcgagtaccgagtttttgatatggttgataattccgctcgcttcagactgctgatagatcgcaatgtcttttatatagtttccaagctcgtcgtagttctttaattgaacaagaccgagaatgacgtggagcttgttcataaactcgtgcgactgcgccctgagcgcgtttgcgtacattttaacaccggacagctgctcagctaagtgcttcacttcggttttgtcgcggaatgtcgcaatcgctccgacgatgtttcccttttttaagtgaatcggaacttcattaaagacaagttcaaggccattgattctgacatcgcggtcctgaacgggcttctgtgtttcgatcacttgtttcagtcggctgtttggcaagatgtcgagtacatcccggtcgatcggattctcttcgatccccattttttgaaacaggcgcttcgcttccgcattggcgagcttgatttttcctgttcgatcaacggcgagaatcccttcttttgtcgactcaagcattgcgcttcgttcgttcaaaagcgttgcaatttcatatggttccatgccgaacataatcgttttcactttcctcgccacgatgacagctccgatgattccggcgacgatgctgaggacgatgaccgtatatagagggcggagattttgctgggtgatctgctcaatctcgttaagggtgatcccgaccgctaccgctccgacctgggtgcccgttgtattatagatgggaacgaaagccctcagtgattcaccgagcgtgccttttgccgtactaatgtggcgtcggcccttcagcacttctttttcgtccccgccggcaaatttctttccgattttattcggatcggggtgggttttgcggatgctgttcatatccatgacaacgacgaattcagtctgggtgattttttgaacgcgggcggtgtatttccggagctcttcgtattcgccgctttccagcgattgtgccgtaatcggagcctcggcgaccatctccgccgtctgcagggcaatctgctgctcctgctcccgaatgttccttgcggtctcagagccgaccataaaaaacgcgatcaataaagaaattaaaacgacgacgcagacaaatatcgttaaccgtgtctgcagttttaatgtttttttcaacggcgattcctcgcgatctattgattagtcaacacataatactttacaagtaaatggcgaatttgtgaagaatcctgcacctttctgccgcattagcagaaattaaaaatatggaaaatattcttgtcaacaggtcataagtcgtacataatgaatgaggaacatatcagaaagggacttttttttatgaaaaatacgtatgtaacaggcttttttccttttatcgcaattcttcttttcagttcatctcttgcgatttcttccgttatctatgccatgcagatgctgtcttctctcggcatctacaaagggatgctcgaatttttctctgagagcggcatccggatggctttgtttgctgtgtttacgctgatttttttcatggtattttccgctttgaagctgattgccaatacagtgacagagcttgcccttttatttttcgccaaagatcctgaaggagcgaatctgagaaaaatcaggatcggttctgccgtgtatctaggagcaagccttttatcttttatttttgtccaatatgccgcgggaattgcagcgctttttttactcgcaactctcgtatattttatttttatcgtttatacgatccacagcacgctttcattcatgtcattaatcggttttattatgtttgagctgctgttttggtttacgtttatgatcgggacggtgtatatcatcatcaagctttataacagcgtcatggcgagcctgcccgtttgagccatgcaaaaaaccggagcgcggacgtttgtccggcggctccggtttttttatgataaaaatcgttttctgatctcaggaccgggaacggtgcactcgcttttttgcccgaaccatttgtagcggtttttcgcaatgacactgtagacggcgtcccgaagcggccggggaatgatcaagagggcggaagcggcccgccaaaggcccgggaggcttttcaccacgtgcaaggcggccgttgacttttgatatacccggccgttttcgatcaaaataaagctgtcaaaatgatcggaagggaggtgatattgcttgagcagattccctccggcgtcagattgcagggaagcgaatgaaaataagccttcaggatcatgtttgataatgaattgcacggctccgtcgcaaaagttgcacacgccgtcaaacagaacgattcgatcgggcatatccgccactttcatccacccctttttttaatttaagatgcgtattgcagcgttcctctccagattaaaagttgaggtcccgcgtgatgcaggtactcgacagtgccttttgcctcttttccgacccatacactcattgtgtatgtatccgtcaatccgacaaaccaaaggtctctgtacccgttggatgttccggtttttcctcctacatatccgccgctgaaattcgctttttttccggttccttctttgacaaccgctgctaagagttcgcgcatttggctgtttgtccgcatgctgaatacttgctgcggcttgtctttccatttgtatagcgtttttccttttaaatccgtcacctttgtgattgcatggctggatgtatagcttccgttattgccgaaggtcgtataggcatcagccatctccagcggtgagaagccccatgtaaatccgcccagcgcagcaggaagacggtagtcgttttgaacgattttatcgaatccgaacggttttaaatagctgaatcctttttgcacgccgacccggttcagcatacgtacggctggtgtattatacgaatatttaaaggctgtcttgatcgacacggttccgtatgttctttcgttgaagttgttcggacagtattccttgctgcaaaatttgcttgcgtcaatcatgctgcctgccgtcgcacccgtttcttcaatgtacggcccgtagtcaaggagcggcttaattgatgaccccggctgcctgtatgcttggaatgccaggttataatcgtactttttatagtttttcccgccggacatggcgacgatttgatgggtttggtggttgatcaccactgctccgccttgtacgccttcataagggaggcggttcttcacttgctggacgacacggttttgcatgctggtatcgagcgccgtataaattttgattccgcttgtcgtgagggagctgattcggtttgacagctctttttcgatttttttcttttcttcttttgtttttgcctttttcagccgttcgtcaaacccttccgtagcggacaccaatttggtgaattcctcgttgacataggtcgtatagtcgggatagtcgtctttcttttctttcacgttaagcgtaattttttgcttaacggctttgctgtattctttttcggtgatcacgcccgcttttttcagcccttcaagcagccgcttttggcgggtttttgtgtagtcaaaatgtttcaaaggatcatataatgtagggttattagggatcgcgcaaataaacgccgtttcggcaaggctgagagatttcaaaggcttgctgaaatagaaagaagacgcggatccaattccgtagaccccgtgattaaaatagatggtgtttaagtatttctcaaaaatttcttcttttgaaagctttttttccagctggtaggaatacaggagctcagtgaacttgcggtcgaaggttcgttcatggttcaaatacaagtttctcgaaagctgctgtgtaatcgtgctggccccctgatcaatgccgccttttttgacattggctgcggcggcccgggccatcccgataaaatcaaagcctttatgctgaaagaaatgacggtcctccgaagtcagaaacagctgcttcacatgttcagggatatctttataggggacgaatacccggttttggtgatctgaaacgatttcggaaatcagagcgccgtccctgtcatacatgtagctgttttgtacaaggccgatatcctttatattgatcttctcatcgagcacctgatcgagaggcttcatattctgagcttcccggccggaggccattaaggtaaagacaaatataggtattaacatcaacagaaaaatccatccaaaaaatgaacgcaactttgtcactctcttttcgctaaattctagccatatcgtaccattctttttggatatcgagaaggataatttgatagattggcagtttttttatccgatttcagcttgctttcgcctctgattttttttgctgggacctttggaacatcagaaggcatgctccgccgaaaaagaggacggcagttgcgtaaaaggcggaagaaataccgaaaaagctggaaagaatgccgccgagcaccgggccgatgacattgcctaaaaatctgaaacttacattatagccaagcacttctccttgtataggccccggtgattcaacccggattaaagcggtgatgcagggaatcatcccgccaagtgcgattccgaacagaaagcggaagaacacaagcgtttcatactgagatgtaagtccttgcgggataacgcaaaccgcggcagccagcgcgagaatcatcaatatttttccgtggccgaaccggtcgcccaaagcgccccattttctcgcagcgagcaggcttccaaggccggttgcagaaaaagccagccctgaaaaaaatgcgagattctgagttccgtgcagttcgctgacgtataaagcgagcagcggctgaacactgaagtttcccacttgaatcacagcggtgaggatcatcgccgtgatcagcggacgctgatgcagaatcgtctgcagaacctgctttctcgtgtacccggcggaagcatcgcgcttctgcttcaggggccgttcgcgcactccggcaaacacgaggaaaaccgcgctgtaaatcgcaaatgacgtaatgaaaaacgtatatgtaaaaccgacgtgatcggcgagcagaccgccgagcaaggggccgaataatcctcccgagaccgtgcccatctgcagcgtgccgagcactttgccagccgtttttttcggcgtctgagccgaaatcatggcaagggaagtgggaatgaacccggttacgagccccatcgccattctcaaaaaaaacagctcgtatacggacgagacaagggacatgagaagaatggaagtgccgattccggtacccgtgatcaagaggatttttttatagccgtgtttatcgccgaaccttccccaaaaaggagaaactaaaaaggccatcaaaaatgtgacgccgaaaacgtatccgctccattttgccgtaaatccgtccgaatagctgccaagcgtctcaatatagagggaaagaaacggcagaaccattgtggagcttgcggccacgaaaaaattcgcaaaccacatgatcacaaggtttttcttataaacagagatgcgaatcaccttcttaaaaaatttgaattccctttcattataaatgaaatgcgaaagctgcatggaattgatgctctatagaatgacgaaaaatgggcatttgaaggaattttcaacattttcagaaaataaaaccttaaatatagaaatataatgatataataagagaaatatgagcgtactttggaaaacattcagaagactataggcttggataatttcaatccgctgcgttaccaccataagttttttatattgagatagaaaggcaggtgtgaaagttggaagcgagcaccttactgattattgattttgaatttacaatgcctgagggaaagtatcacccgcaaaattttttcccggaaatcatagaagcagggattgtaaaggcggttcatgatgaggtggttgagacgttttcaagctatattaagccgaagaagttccctaaattaacgaggcgctgcaaaaattttctcagcatcacgcaggaacaggttgaccaaggcatcacgtttaacgcgctgattgaaaagctgcgggagcttgatcctgaccgaaacagcgtcatcattacatggggaaacatggatatgaaagtgctgaagcaaaattgcatgttcaaccatgttccgtttccgtttaaaggagagatgagggacctttccatggagtacaaggaatttttcggcgacaaaacattgacgaatttgtggaaggcagcggaagagtacggcgattcaggaacgggaaaacagcataaagcgcttgacgacgcgatgacaacgtataagttgtttcggctcgtagaacgggataagaagtatttggaaaatccgaagccgacgacgatcggcgaacgggttgacctctcaaaagtctttccgcacgccacataaaaaacccaatctgacaaacagattgggttatttgtgcaggaaatattctttttcaagcccatgaataagctcaagcgattttgccgcgtattcggacgaatcgttttgcagatccgtttttaagcggctcaaagctgagcggagcgaatccgcataatccggtacagcttcatcgaacggcttcaccatgcggtgcgggatattcgtctgttcaccgtaagcgagcgcttttcgttcatgaaaaaaagggacgtctgcccgattgggatgatgaaggtcgccctgcttcggatgggtcagcacggcgaggattttgaccaggtagtgcatcggtttaacatccgtaatttcgccgatgtagacgcctgttttataaaagccctttacgcgatctccgacttgaaattggttgttcactgcatctgcctcctaatggtatcataataaataaatggtaaaaaaatcatttcagggaggaagaaaaatggcgccgtttctgattcagtttatgctctattttcctgaagacaaaagagaatatatcccttcttttattacgctggccgttttctttatcatcgcgatcgctgtattccggctgattatcaagcattccaaaaaagaagctgaaaaagcggaaaagctggaaagagaattgaatgaaaccatccataaacgctcttagaagcgcccggctttcagccggaacgcttacgaaaaagcggtcttcagacgtcggagtccgtcttttacaacagagagcgaacatccgacattcattctgacgaatccttctccgcccggtccgtacttcggtcccggctcaagaatcagctttcctttatgaaggagaagccgtttgatgtcctgatccgacaatccgagctttcggcagtcaagccatgccaagtaagaggcgtcaggctccatcatgcggacctcgggcagctcctctgccaaaaagcggcggacttcttccatatttcgttcaatgtatgggataagctgatcgagccatggttcgccttttgaataggccgcctcgatggctgcaatcgcaaatgtatttaaagaatgcagtccctgacgctgcatgacctttgcaaaggcggttctcttcgctttgtcgggtatgatgatggctgaggcctgcaacccggccaagttaaacgttttgctcggtgcaatgcatgtgatggatatatccgcgaattccggagataaagaggcgaacggcgtatggttcagtccgttcagcatcaggtccgagtggatttcgtcggaaacaactgtgacaccgtgtttaaggcagagttcgccaagcgttgtcagttcctctttcgaccatgaacggccggaagggttatgcggattgcaaagaatgaacagcttgacatccggttccacaagctttttttcaaggtcggaaaaatccatttcatagcggccgtctttttcgattaatggattatgtaaaacaacccgcccgtttttttcaactatatcaaagaacggcgtatatacaggcggctgtacgaccacccgctcgccaggctctgtgtacgcctgaaccgcttgggcgagcgctgttacaatgcccgggctgaaggtgataaacgccggttcagtattccatccgtgccggcggctgagccaatcggtgacagcttccttcgtgcccgcgtttgcagatgtatagccgaaaaccccgtgctccaggcgctgctgaagggcgtcaataacaggctgaggggcacgaaaatccatatcagccacccacattggaagcgcgtcatttacgccgaataattcctgtgttaagtcccactttacagactgggtcccgcgtctgttatgctctgtattaaaatccatgatctcacctcatgtctttttcatatgttatacattaactgtgaaaaggatagattgcaatgttttaaccatgaaagcttttataaaataaagggagtggcagctggtggaatggagcagcatccttgagtgggcttttcagcgtcatctcaacccaatgagctggtatatacgcccgctctttctggtggcgctcgcgtacttttgttataggcggtcttggaaaggtgtcatcattacttttttgctgatgacgagcagcatggtttggtttcccgtccccgagcggatcaatccggagatgcaggccgttttggattacgagctaatgcttttgtccaacccgctttcagccgtggtcacgctcgctttcatgatgggttttctcgtgttgattggcacggcattttggaagcgctccttagggtgggggcttgcggtattgaatgtgacgctgatcggaaaggtcgtgctgtcagtgatgctgacgggggaaaacggctgggcgcccctcggaaataccgtctttggattgattctcgtcaacggcatcgggctgctgctgatcgcctggagggagaagcggggaaaagccggccgttagcctgcggctttccttatcgacaagccggcatgttgtgatacaatagcctttgaaacattaatatgaagcggtgatcatgatgaaagaaagtcaggcagcagcacaaatcatacacatcataaaggaatgggatccgtttcaagccggacccgatttttatgaaacggaagcggccgaaatcgttcaggccgtctatacggaagacgatgcagagcggctgggcgaagcgatccagaccgtttttgaagtatcgtttgatcagacgctgcctctgtcggaatgcaaacggctggctgaacggctccttgtgatcaaagacagcagttcgtgctgaacagaatttaaaaaccgccaaccggcggtttttttatgttcatgtcaaaatgaaattggcaatcttgtctgatacataatccggattttcttcagggacgaggtgtccggtttcttgcagggagtagaaaatggaattgggcagatcctgatgaagcctttttccgatctgtaccgggacgacgcggtcctcttcgccccagatcaagagggaaggcgtctcgattttcttcaaatcatccggtgataaatcgccttcccggtgtctgataagacgtgcgagcgccctgaaaatttgatcatcgagaaacggtttcaggtagccgttgatcatttcctgatcgatcagggagctgtcgtagacaacattcatgaggtttttcaggacgccctgttttgacagccagcgcttgatgtacaaataaaaataaggaatatggctcccgaaaataagcgagcggggcgaacgctttaaatagcctgagctgcacagcaggacgacttttttgaacagttcaggcctttcctttatcgcataaagtgaaatctggccgcccatcgaatgaccgacaagcacggcgtctttaatcttcagcctttcgatcagttcgatgaccaccctggccatgttttgataggtatacacaaaggtgctggatttttctgattggccgaagggaggcaggtcaacggcgactaaattaaactcatccttcagaagaggaatgatttttctgtagcaaaacgaggaagaaagaaaaccgtgtattaaaacgagcgatgtcttgcctggattctcgtaatgttcataatatatattgaccccttgaatggtctcgatagaaggttttgttaacagcatgatccaaatcactccgaatgtttttctttcatgttcaaacaatctggctgcatgttgtcgcctaagtcctgagtatgttatttatcgttcccgaaaaaaattttttcacgctgcgatttcgctttttttaccgccttacattcgtataaaaacgtgctataatattcagaagatttcttgacatataaaaggtgtgataacgagatgaagctaacagaaaaagaaacagaaatattggaaatattagaggaaaacagccgcctcgaacctgaaacgattgctaaaatggcgaacatttcacaggaagaaacaaaagcgattattgaaaagcttgaaaaagaaaaggtcatcatcgattattctgcaatgatcgactggcgaaaagtcgacggccatgaaggcgtgacagcgatgatcgatgtgaaagtaacgccgaagcgcggcgtcggatttgacgaagtggccgagcggatttatcgttttcaggaagttgaatccgtttacttgatgtcaggcgtatatgacctgtctgttgtcatccgcggcagaacgatgtcggatatttcgcatttcgtgtccgaaaaattatcgacgcttgaatcggtcgtgtcgacaaccacccactttattttaaagaaatacaagcatgacggtaaagtttttgactccggtgatgatgacaaaagaatcgtggtgtctccttaaatgaggacaacttatatttcaaaagcagcccagcagatcaaaccgtcaggcatccgcaaattttttgatcttgcgtccacaatggagggcgtgatttcattgggagtcggagagccagattttgtgacggcgtggaatgtaagggaagcgagcatcctttcccttgagcagggctacacgtcttatacggcaaacgcgggtcttctttctctgcggaaagagatcagcgcttatctgaataaacgttttcatctggattatgctcctgatgacgagctgattgttacagtcggagcaagccaggcgcttgatattgcggtcagggcgatccttgatcccggagaagaagtgctgattcctgagccttgttttgtcgcttatgaagcgcttgtctctttggcggggggaaaagcggtccacattcatacgaacgcagagcgcggatttaaagcgagcgctgcagattttgaagccgttctgactgagcgtacgaaggccatcattctttgcaccccgtctaatccgacaggctctgtttattcaaaaaaagaactggaagagatcgcggcttttgccgaaaaacacgacctgattgtaatagcggatgaaatttacgccgagctgacatacgatgaagcgtatacaagctttgcggaaatcgccggaatgaaaaagcggacgatattgatatcgggtttttctaaagggtttgccatgacaggctggcgcctcggatatgtcgcagctcctgcatatttaagggaccctatgctgaaaattcaccagtactcgatgatgtgcgcgccaagcatggctcaatttgcggcggaggaagcccttaaaaacggcctcgaagacgttgaaaagatgaaaaaaagctaccgccgccgaagaaacgtgtttgtggattcactgaacgaaatcgggcttgactgccatcagccggggggcgctttttacgcgtttccatccgttaaaaaaacgggcatgagctcagagcagtttgcagaggagctgctcatcagcgaaaaagtcgccgtcgtcccgggcaatgttttcggtccgagcggcgagggctatatcagatgttcctatgcttcctcgcttgaacagcttcaggaagcactcgtcagaatgaagcgctttgtggagaaggtcggtgcagtaaaataaaaaaatgcgcacctgaaaggtccgcatcaacataaggggggaatactagaaagccttagttgttctttagtattcccctttcaactcggttttaaacatacaatgctaaaaaaagtttttttgcttaataaagacttgtatgatataattttttattgcgtataaaaagagattaaattcataagatttaggagttgttagttatgacagcaaagtttgaagtaggcagtgtttacactggtaaagtgactggattacaggcgtacggagcgtttgttgcattagatgaagaaacacagggactcgtgcatatttctgaagtaacacacggtttcgttaaagatatcaatgaacatttggcggtcggtgatgaggtgcaagtgaaggttctttccgtagatgaggaaaaaggcaaaatcagcctttctatccgcgctacacaggcagctcctgaacgaaaagaaagcaagcctagaagacaaaaggctgttcaagccgaagatacagctgctccacaaggattcaacactttgaaagacaaacttgaagagtggatcgagcagtccaacagaaaagatcttattaagaagtaaatgaaaaaactccggcaaaagccggagtttcagcgtgtcgacaaaccctcgcattcgttgtcaggcctgcgcgtcggtgctcacgaattccaacattcgctccgctccgatgctcggccttcctagactgcaagggttttcaatcacgctgaaaggatgacaaaatcccaaaacaaaagccgttttgggattttgtcaacaatcttaaactccggcaaaagccggagtttttttaacgcatttccggctgtttggcgtcttcgccggcggtctcttcagcaggtttaaataaaagtccgaggttgatcagacctgcgattccgacaagcgcgtaaacggtccgtgctaaagcagacccttggccgccaaaaatggctgcaaccaagtcaaattgaaaaaatcctatcagtccccaattgattgctccgatgatcgttaaaaccaatgcaatacgttgaagtgcattcatttgttattcctcctattttgaaatcatatatttcacatttatagattgcgaccgatttggaaacattatacgcctgaggagcagatcgctttacagagcgttcggcgatttcccataatagtaaataaaggaggagatgtagatggataactttacatattggaatcccacaaagctgatattcggccggggagaagttgaaaagctggcagaagaggtgaaacaatacggccgcaatgtcctgctcgtatacggcggaggcagcattaagcgaaacggtttatacgatcaagtcatttcaatccttgaaaaggcgggcgcgaccgtccatgaactgcccggcgtcgaaccgaatccgcgtgttgccactgtgaataaaggagttgcgatctgcaaagagaacgatattgactttcttttggcagtcggcggcggaagcgtcattgattgtacgaaagcaattgctgccggagcgaaatacgacggcgatgcgtgggatattgtgacgaaaaaacatattccggctgatgcgctgccgtttggaacagttttaacgttagcagcaacaggctctgaaatgaactcgggatctgtgatcacaaattgggaaaccaatgaaaaatacggctggggaagcccgctcgtattccctaaattttcaattcttgatccggtcaacacgtttaccgtcccgaaagaccacacgatttacggcattgtcgacatgatgtcccacgtgtttgagcaatattttcaccataccgaaaataccccttatcaggaccggatgtgcgaatccctgcttaaaacggtaattgaaacagctcctaagctcattgaagacctagaaaactatgagctgcgtgaaacgattctgtatacaggcaccattgcgctgaacggcatgctatcaatgggcgcacgcggagactgggcaacgcacaatatcgagcacgctgtttcagccgtatacgatattccgcatgcgggagggcttgcgattctgttcccgaattggatgaagcacacgctttccgagaacgtcggccgctttaaacagcttgccgtccgtgtttttgacgtagatgaaacaggaaaaaccgatcgcgaagtggcgcttgttggaatcgagaaactgtctgaattctggaccagccttggcgcgccaaatcgtcttgccgattatgacattacagatgagaagcttgatctcattgccgacaaagcgatggcaaacggcgaattcggccgctttaaaacgctgaataaagacgatgttctgtctattttgaaggcttctttataagatttcttgacggctcaaggagaaccgccattccttgagccgttgtttattgttatgtttttgacaaaaatgcaagtggaggctgaaaaaacatgcatttttggcgggcatcctccatcctcctttttttcgtcacttgatttaacgaaggagttcatataaagtgaaaagggaagaggctgtcgccgaaaatcgacatgttttaaaaccctttggcccgcactctcatgcaaatgaaagcgctggcgggtatttgaaagaaaacagctagtactggaggtttaataatatgacgcatgtccgttttgactactcaagagcattgccattctttaaagaacaggaacttacatatctgcgtgacttcgttaaagtcgcccaccataccattcacgaaaaaacaggtgcgggcagcgactttttaggctgggtggatcttccgactgactatgataaagaagaattcgcccgcattaaaaaatgcgctgaaaaaattcaaaacgattccgatgttttgctggttgtcggaatcggcggttcatacctcggcgcaagagcagcgatcgaaatgctgaatcattcattttacaatgtgctgccgaaagaaaagcggaaaacgccgcaagtgattttcatcggcaacaacatcagctcttcttacatgagagacgtgatggatcttcttgaagacgctgatttttcaatcaacgtgatttctaaatcaggcacaacgacagaaccggcgattgctttccggatcttccgcaagcttcttgaagaaaagtatggaaaagaagaagcgaaacgccgcatttatgcaacgacagataaagagcggggcgcattaaaaacgcttgctaatgaggaaggttttgaatcattcatcattcctgacgatgtcgggggccgcttctctgtgctcacagcggtcggcttgcttccgatcgcagtcagcggagccgatatcgatgaaatgatgaagggcgcccgcgatgcgagcaaagacttctccacatcagagcttgaagacaatccggcttatcaatatgcggtcgtcagaaacgtcctttataacaaaggcaaaacaattgaaatgctgatcaactacgagccgggccttcagtacttcgcagaatggtggaagcagctctttggtgaaagtgaaggaaaagacgaaaaaggcatttacccttcttcagccaacttctctactgatcttcactctcttggacaatacgtacaagaaggaagaagagatatgttcgaaacggtgctgaacgttgaaaagccaagacacgagctgacaatcgaagaagcggacaatgatcttgacggcttgaactaccttgccggcaaaacagtcgacttcgttaataaaaaagcgttccaaggcacaatgctcgcgcacacggacggtaacgtgccgaacctgatcgtgaacgtacctgaaatgaacgcttacacgttcggctatctcgtgtacttctttgaaaaagcctgcgcaatgagcggatacttgctcggcgtcaacccgtttgaccagcctggagtggaagcatacaaagtcaacatgttcgcccttctcggcaagcctggcttcgaagagaaaaaagcagagcttgagaagcgtttgaatcaataattgaaaaaacacagcctccggacttattgtcccggaggctgttttaattcgtatgacggatgctgaagtccggtggacggataaaattcgtcatgtatgtagacgaatcctaatttctccaatcgttttcgtgaagctgtattttcaggatgatgtcccgcaaacagcttttttgcccggattttgttaaatgcgtactcaatcatggcttcagccgcttcagatgcataacctttaccccaagctgaacggacgagatgaaaaccaagctcgtacacatcattttccgggtcataggggcgaaggccgcagcatccgacgaattcattgttgcttgttttaagaaccccgtgtgttttatattgttcgatttccagcagcaaacggtttcttatttcgccttcggtcatgattccgtctgctgttagataattggtcacatctcgatttccccacaatgtctttgccaaattcaaattctctttcttccataaagaaaagccgatgcgtttagtttgcagaaagtggttcattccgatccccctgtaaggctgctgttcaccctattttaacacagctacagccgtcggggctctctaggctaatgattcatcccgtaaatcgtaaacgcgagataagccgcgaaaaaactccacagcacataagggataaagagaatggccgccgttttgtgaattcgccgtgtgataaaggtgagcgaaagagcggtaatggctacgaaaaaggagtcgactgcggcagcaagtaagtttttttgcgtaaattgaaaatagctgaatgcctggttaaacacatagttgatgatcagcatgatccaaaatggcgcagctgcttttctcatgtcatatgcagcatacacgagcgccgctgctaatgaaatgaaggcgaacagcacgctccagacggttccgatcaaacggcctgacggcgtccaatccggcttgtttaatgactcataccattcccggtctacgggaaataaaattcctgcgagtgaaaacagtgcatatataacgagaaacactatcacagccgttactatttttcctttcttcaatagaggttcctcccaaaaataaccttataacattgtctttccctatttgttcaaatatactcataccgcgcaagcttctgaaccatactaaaaaaataaaacggttggagtgacaccatggcatttgtattggaaacattgtttctcatcttaacgggcattgttctgctgagaatttcgggaagaaaatcaatttcgcagatgacaattgccaccaccgtcgtcatgatatccatcggaacgatcatcgttcagccgattatagaagacagcatttttaaaacggtggcagctgcatcgatctttatcatcgtccttctgttgatcgagtacttgaaaatgaaatttgatttttttgaaagcctgattgcggggaaagccgttgtattgatcgaaaacggggagctccaggagcagaatttaaaaaagcaccgcctgaccgtcgaccagctggaaatgaggctccggacacaggggatttcaaagttagcggatgtgaaaaacgtaacgctcgaatcaaacggccagatcggctacgagttatcggatgatgccaagcctttcactatgggagagtataaaaaattcctgcgcatgcaaaacaacctgcagcagccggaggacaacctgtttaaagaaatcaccgaaggccatctgaacgaacctgataagcaattgcgctaaagtcctggcatataaaaacgaaaaaaggagtttttttcatgataagcttaccttctgaactggaaaaccggtcgttttctctttatcacctcgaacagacgctgaagcctctcggctatgtgatcagcggcggctgggaatatgaccgcggcttttttgactataagattgatgatgaggacggatacctgtttttgcggattccgtttgaggcggaggacggacagcttgattcgcaaaatgcgacggtcaagctcggcacgccgtttttgcttcgccatgtctatcaggaagcgctggatgactacgtcgttcaggggaatttccgcgcatcttttgaccagtttgccgaaccgaaagaaaaagacgccgatattcccggcgtctatgaaaagcttggccaatcgtatgtaaaagaactcgaagaggcgcttctttcttaaagggacagcagctggtccgtcggctgtagcttgtacgaaaaagaaggagacagcacaggcccgtctttttggtggacaccgatgatgaaaatgtcttccttcataaaatggcggatcacttcttgaaaagacgcgccctccatcgtcttcggaagcggaacccgatggactttgaaatgaatatccgcttccgtaaaaagcggatcaggaagctggtctttaatgagaaaatgctgcagcatcgccgtttttaaaaggtccgccgtactgatgatttggttggctccggcgcgctcggcattttttttctgcttttccgtcaagatttctacaacgcaatacaccgacgggttcaagcctttaacggccagcaatgttaagaccgactgcatgtctgcagatatttcgcttttatgctgatcggcggttataaagacgatttcagcctcttcgatattcgctttttgcagtgtggcatcatccgctgcgtgtcctctgatgaaatgaatgttttccatcaggggaccttcctttagcgtttcatcaatgaggacgatcgttttgtttgaatcggcggcctggagcgtcctcatcagcttgttggatttctcgttccagccgatcaggatcatatgccccttgcctctgtagttcaccttgccttcggcgtagcgctgctgcttgctgaaagcggccgtcgccatcgttgcaaaataggccgtgacaaacgctgcccctattaaaatcaggagcatgccgacgattttgccgagcgctgttttagggacaaaatcgccgtatccgactgaggacacggtgatcagggcccaccatatgccttcaaaaacatttgaaaactgctgcggctcgacgaaggtgatcagctgaccgaaaaggaggatcaataaaaggataatgattgcgatgcggacatatataggccacctcagccatgcgatgaatacacggtttgatttcatgcttcttcaccgtctttccgcagggaaaatgataaaatttctttgatgatcgcatttaacttttgattggtgctaactttcccgtgctgttcaatcgcttgtctgatcatctctgccgtttcttcttcaaattcgatcagctgctcgtccttttccgattcgttatagagaagaatgaacgcatcaagcccttcattcattttatcgatcgccgtgcttaactgttctttttcctgatccgttactttcaccgtgtcaccacccgagttcgcctttttaatcagtatatccctcttttgcaaaaatttttcaggtaataataaaccttcgttaaccgacaataaccggtagagctgaagattttcgctgcggcgtcatatcggttcccgtccttccatacactttttataaacgaatgagggatgggagcgaaatgtcctgtttaatgaggctctttttcatactgatcggagtccagttgatggcggcgtcgtccattcaattcatttttgatttaaacgccgtgtatcattcctctgatgaggtgttctggagggaatttttcaaggagctgttcactaggccgcctttatacttcatgatttcaggaatggtgctgatctttatcggggtttgtttgccgcgaagaaacaaatagtgcacttttctgtacaaaaggaaatccctcgggctaaaatatatttacaattacaatttttaaacaacttatcacaagagggaagatgattgcatgagcatgattttttacttgttaacatttgctgcattaggtttatcgatttgggcacaatttaaagtaaagagcaactttgaaaaatattcaaaagtagaggcgtcaagcgggagaactggagccgaagtggccagacagattctcgaccgaaacggcctttacgatgtcccggttgaaccggtaagaggaaccttgacagaccattatgacccgacagcacgcgttgtgcgcctgtccgaacccgtatactacggccgttcaatcgcagcggtttccgttgcttcccatgaatgcggacatgccctgcagcaccaggagtcatacggcgcacttgttttgaggcataagatgtttccggtcgtgaacttttcttcgggagtggcgccgtttttgtttatcggcggaatgctgctcggaagcctgaatctgatcggactcggcatcatattgttttctgcggccgtattcttccagcttgtgacattgcctgttgaatttaacgcaagctcccgggcaaaaaggatcatcgtttcagaaggaatgatccgcaatacggaggaaagaggcgtcagcaaggtgctggatgccgcggctctgacatacgtcgcagcagcgcttgtttcgctgtttgagctgctgcgcttcgtcgcaattttcctgtccggtcgtaatgactaaccattcgttttaaggaggtggccccttaccatatttggtaagggctttttttgaatatcctgaatctcatactcgtcatacttttaattgcagctacggcttttttcgttgtcgccgaatttgcgatcgtcaaaatccgcggcacaaaaatcgatcagctcgttgaaagcggggataagcgggcgattgcggccaaaagagtggtgacaaatcttgatgaatatttgtctgcctgccagctcggcattaccatcaccgcattagggctcggctggctcggagaatcgacattcgaacagatcattcacccgctttttgagttatttggcctgcctgagtccgttttaagagtggcttcggttgttgccgcatttatcatcattacatttttgcacgttgtggtcggcgagcttgcgccaaaaacaattgcgattcaaaaagcggaagccgtcagcttatggacggcgaagccgctcattttgttttataaaatcatgtttccgtttatcaaactgttgaatggctcggcccggctgttaacgaagctgttcgggttccattctgttaaagagcatgaagtggcgatcagtgaggaagagctgcggcttatgctgtctgaaagctataaaaaaggggaaatcaatcagtctgagtataaatacgtcaacaaaatttttgaatttgacaacaggctggcccgggaaatcatggtgccgagaacggagatggcgacgcttttggccgatcaatccataaaagaagcgattgaaaccgtcattaatgaacgctacacgagatatccggttattaaggacgataaagaccatattatcggaattgtcaacagcaaggacttgtttaaatcgtattttctcgacgagacgattcctttaactgacttaatgaggcctgtcatcagggtgattgagaacataccgatccaggagctcttgattcgcatgcagaaggaacggatccatatggccattcttgttgatgagtacggcggaacggcagggctggttacggtagaagacatattagaggaaatcgtcggagaaatcagggatgagtttgatcaggacgaaatgccgcacattataaaaaaaggcgaacatcattatattatggacggaaaagctttaatcgacgaagtgaatgacctccttcatatcgcgatagaaaacgaagaagtcgatacgatcgccggctggcttttgacgcaaaagatggagctgaaaaacggggacatccttaaaactgaggggtgcgaatttaaaattcttgatgctgaagatcatcatatccgtttcatcgaagtgaaaaaaacggatttttaaaaacagctgcggttggccgcggctgttttttagttcgatggccgttccttatttcaataaaatggatatttattcaaagataagaggatatatctatggaaaatcatgactttttacgaatgtgcaccttgtcgttcttttttataatatgatgtataaatatgaggaggtttttaatacgtgaaaaacaaccatttgctaaaatccattctgctatggggtgccgtatgcatcatagtgctggcagggccgctctcagcatttgccgcttcgtcatcaaacccgtcggataaattgtattttaaaaacaaaaaatactacatattcaacaatgtatggggagccgaccaggtcagcggctggtggcagaccatttatcataatagtgattcagatatgggctgggtgtggaattggccgagcaatacaagcacggtaaaagcttatccgtcgatcgtcagcggctggcattggactgaaggctatactgccggaagcggcttcccgacgcgattgtcagatcaaaaaaacatcaacacgaaagtcagctattcgatcagcgcaaacggcacatacaatgccgcatatgacatttggctccacaatacaaacaaggcgagctgggattcggctccaaccgatgagattatgatctggctcaataacacaaacgccggacctgccggttcctatgtcgaaactgtatcgattggcgggcacagttggaaagtatataaaggctatattgatgctggaggcggcaaagggtggaacgtgttttcatttatcagaacagcaaacacccaaagtgcgaacctgaatattcgggatttcacgaattatcttgccgactccaaacagtggctttccaaaacaaagtatgtcagcagtgtggaattcggtactgaagttttcggaggcacaggacaaattaatatttccaattgggacgtaacggtccgctgatggatttgcaccgctctttcgcaaaaagagcggtgtttaatttattccaaatgttcttttttaggcgttcgcaactgaaatattacgataccatccttacgtattgccgtttatcttcatcctgaataaccactccaagctttgccaggtctttgcgcagaatttttgcctcttcatgtttattatccagtaaagctcgttctctggctaaaagtagcgtattgatatgcgagggaaaatcggggtgatccgcaacccagcgttgatactcattcttaaagggatcttcgtctgcccatttatagccgtgatgtttaaaagcactttctgctagcgctctctttgattcaagttgttcacggtacaattcagtgcccttatgaccaagaacaacaagatccttcttctcaagataaattgcagaaatgtcttttttctcaatcacttcttctttctctttaaacaacagcttcacgttttgatcagaaatgaacacttgaagaatttcagtgaaaatatattgtgaaaaaaataggccggcaacgattccgataaatgcagcgataattgaaacccagaaactgtttagtgatgtgataaattccaaaggccctttaaaaggaacgattggaatggtcaatacccaatcggctataacaggcaaaaaccatccaagaacagctcctaaaaccggtggaatgatccaatataaggttttctctattttagacaatccaataatcgtttcctgattcaaaatctttcactgcctttcattacattactgactgctgtttcccatacttttttataatccatctcaattcctaaaatcataaagttacccaaattatcaatgatcagggcaagggagtgtgcattcactttggtgtttttagaagagatgacaccgagttcgacaccgtaggaaagcaatgcttcaaaaccttctaagaattgttccatgatagatttaagctttttctcatatcttggtttttgtgctgcacttaaaacaaactcgtgtaccacttttaaagcaggagagttatgtttatactcttcaaaatagcgtacgccgtctgttattaatcgttttttaaagttctccttcgtgtactcattgattgaaaaatattcagagaaattgtgatcatcaaatacgatgtgaaatagataatcgataagctcttctttagaagggaaataatagtaaatagccggtttagaaatgccgacttccgatgcaatcattgaaaggctcgtgccttttaggccgtgtcgggcaataagagtaaatgctgcttcaacaatcgcatcttgggtgttcattttctttttcattgaaatcatccttagcataatctatatatttattttacttaccgataggtaaaaaagcaactgtaatttatgctttacatattctgtattaacagatgctccgtttcaaaaggattaaagcttctttcacctactcttgccgtcacccttgctgtcttcaaaggatttatagtccgcaaagcatatttagtattgagaaacgtataatcgttggtatatcaaagtttataggatgtttatgttcggagtctaaaaatattttattcatatatcataatgtcttcacaacaaggggtgtttgaatggcgagggcatggtggaaagaggcagtcgtttatcaagtgtatccgcgcagttttatggattcgaacggggatggcgtcggagatatcaacgggatcagagagaagcttccgtatatcagggagctcggggcagatgccatttggatttgtccggtctttgattctcccaatgcagataacggctacgacatcagggattatcaaagcatcatgccggaatttggcacgatggacgactttgacgaactattaactgaagcgcatcagctcggaatgaaactgatcatcgatcttgtcatcaatcatacgagcgatgaacatccttggtttatcgaatcaagagcagagcggaattccgggaaacgggactggtatatttggcatgacggaaaggacggaagcgaaccgaacaactgggaaagcatattcggcggctcagcctggacttatgacgaaaaaacagagcaatattatctgcacctttttcacgaaaagcagcctgatctgaattgggaaaacagtgatatgcgaagcgctctttatgacatgatcaactggtggcttcaaaaaggaatcgacggattcagggttgacgcgatttcgcacattaagaaaaaagaagggctgccggatctgccgaatccggaagggcgccctttcgtgccttcatttgcttatcatatgaatgtcgaagggattatggcgttattgcaggatgtaaaagagaatacgttcgccgggtatccacatatcatgacagtcggcgaagcaaacggtgtcagcgctgaagaagcggaggactgggttggagaaccaaacggtatattcagcatgatttttcaatttgaacacctcgggctttgggatattgaaggcggagaacccgatatccccgaactcaagcggattttgtcaaactggcaatctgctcttgaaggaaaaggctggaacgcgctttttatcgaaaatcatgatcagccccgggccgtttcagtttggggagatgacgggaaatacagaacagtcagcgcgaaggccttagctgcaatgtattttttgatgaaaggcaccccgtttatttatcaagggcaggaaatcggaatgacaaacgcgattttcttagatatagacgattatgatgacgtctcgattaaaaattattaccggattcaaaaagaaaagggccgctcacacgaagacatcatgaaggcggtatggaaaaagagcagggatcacgcgcgcacgcctatgcaatggactgatcggccaaatgccggctttaccaaaggggaaccgtggctgcgcatgaacgaaaattacaagctgatcaatgtcgttcatcagcagcatgacccccggtcggtctatcatttttataaacggttagtcgcaatcagaaaacggtatgacgtcttcatcgacggatcatataaactgcttctggctgaggatcggcagatttttgcatacttgcgaaagcttgaagaagaaaccgccatcgtgatcgtgaacctcagcgcacgccaggcgttttaccatcatcccgcatatccgttatgttcgaacggactgctgctgtcaaacttggatatcaacgcgcacaagcacctcacatctttcatgatgagaccctatgaggcgcgcgtttatttgatcagacaggaaatcggcgatttgtaacgaattgagaaagggtgccaagaaaggagcggattcgtatgttgaaaaaaatacagattcaaacaaaccggcgcgatgaaatgcttgatatcacaaatgacgtccaaagattcatctcagaaaacgatgtttccagcggcgctgttatcgtctactgtccgcatacgacggcgggtataacgatcaatgaaaatgccgaccccgatgtcaaacgcgatatgctgagaaggttcgatgaagtgtatccgtgggaagatgagcttgaccgccatatggaagggaatacagcggcgcatttgaaagcgagcacggtgggcgcatcgcagcatatattgattgaagggggcaggcttgtcctcgggacttggcaaggcatatatttctgcgagttcgacggcccgaggcaccggacgtgctattttaaaattttatccgattaaaaggaggaaataaaagtgaatcagttcatggaacgcctctctttgtcaaagcctgtgatccaggcgccgatggcgggcggaccgacaacgccaaggctcgccgcagccgtatctgactgcggcggcttaggcggccttgcctccggctatttgacgccggaagttcttcgacaacagattctggaaacaaaaaagctgacatcagccgggtttcaagtcaacctcttcattccggaaaaacgggaaaccgtcagccgggaagaatatgaagggtggcaggagaagatacctttggcgcattcggcttcacccgtgacagatgagagacaagattggggcgatttttacgagaaaatagaaatcattctaaaggaaggaatcagcgccgtttcatttacgtttggccctccgccggccgatgccgtcaaggaactgaaagaccgaaactgctgtttaataggcaccgcggtttcagttgaagaagccgtgctgcttgaagaactggggatggatgtcatcgttgttcaaggtagtgaagcgggcggccacaggggagccttcttgaaaacgaagggagagcctgctgtcggctcgatgtccttaattccccaagcggcagatcatgtgtcggttccggttatcgcagcgggcggcatttttgacaaaagaggtgttgctgcagcttttgccctcggcgcacagggcgttcaaatcggtaccgcttttttgacgtgcgaagaaagcggaacacaccctgcctacaaacaaaaattgttcgaagcggttgaaaccgacacaagcctgacccgtttgttctcggggaagccggcaagaggcatcgtcaatcagtggatggaagacagacgccaggaagaagctgaagcgctgccttatcctctgcaaaacacgctgacgcaaccgatgagaaaacaggcgaagcttgacgggaatacggataacatgtcattgtgggccggacagagcgtgcgggccaccgtcgagcaaacgacggtgaaggagctgatggatcagcttgtgccggccgatgtgctatctgatcatttgaattaatgccggaatatcaacccgcgtcacttgggaaagcagataggcggacgtctgtgcatgaggctttctcagcccgttcagtttttcaatgattgtttcgccgcttaagatccccaggccgtgtgccgcatagagattattttcaagtaaaatagcattttctccgcgccactgcggtcttgagggatcgaattcagggttcttgaaatacaggcagtctcccggaaggtagtcgtttcctttatccgtatagatcggcagccgctcatagtgccaatcgtataaaatgatcctttgataattccggtcaaatgtctggtcgccgatcgttttgagaagcgccatataaaaaatgatgacaatcgcagtcgcgcactcaaaagcataagaagggccgctttcaaaaatatttcgaatcgcctttgaagccggtgccctgtacttcaactccaaagccccctcaggcgtcaccctccaaaactcttcattcccgtatgtctttgaaaaggtggcaaacttcgctccgctgttgatcagctctctggccgatttgacggtatgctctctgaatctcagctcaaataacagctctgagattgaaccgtatctatatccggacggcatggccagcatccggttggcgatgtctctctgcgtctgactgacattcagtttttcgatatcctcaggacggagccggtagcccgaaacacttatcataggatacacccttttccttttttattagcgtatgcctgatgcttgggcaggaaaacggtctaattttccgctttttttatttaaaaaacagaccccgtctccgataaaagtagagaaaggggaatcacacatgaaaaagcttttaaattggatgaaacgtccttctatttctaaaaaattaattttctcttttatattcattttaacaattccgattttggttctttcggttacttcatattttacggccagcagcacgcttgaggatgagattttgagaagtgcgaaagacaatatcgatgaactgaacgacatcattcagcaagatatcggcagcaaggagacttccattgcgtatttcagcgaatggattgatcaaaaagcgtacaaagagaaaggccagactgccattaaacaacggtttgagcagtttgcaaaacagaatcccgatgttgaactcgtcttcaccggatcggaagatagtgtttacgcacaatatccgaatgctccactgcccgacgggtatgacccggtagaacgcgactggtataaacaggctgtccaggaaaaagggaaaacgatcgtaactgaaccttataagtccgcatcaacaggccatatggtcgtcacgatagccaagcagaataaagacggttctggggtcgtcgcccttgacttgaacattgacaagctgatcaaatcggcaaacagcatcagcatcggaaaaaccggctatgcattcatcatcggtgaagggaaaacgtatgtcgcccatccgaaaataaaagccggcacagatgcagaagctgatctgacagagcaaatgttcagcaaagagagcggcttgttcaccttcaatgaaaaaggcaaagaaaagaaaacggtcttcacgacaaacaaactaaccggctggaaaatcggcggaaagatgaatacagcggagattaaagacgctgcccagccagtgcttcacatggcagtcatgacattggcaggcgccattattctcggcggcatccttgtttactttatcgtccgcgcgatcagcaagcctttaaatcaactcgtctcttctgcaaaaagcatcagcgaaggagatctgacacaaaaaatcgatgtccgctccaaagacgaattcggccagctgggcacaagcttcaacgaaatggctgactcgttgcgctctctgatcagcacgattcaagaatcggtcgacaatgtggcatcttcttcagagcagctgacggcaagcgcggaccagacaagcaaagcgaccgagcacattacattagccatcgagcggttctcaagcggcgctgaaagtcaaagcgaaaaagtcgaagaaagctcacagcggctcagccaaatgaatgagaagctgaatgaaattgcaggcgtgtcagaatcgattacagaatcctcgggtaaatcgacggaaattgccgaaacaggcggagagctcgtccaacaaaccgtcgggcagatgaactcgatcaacaggtctgtcaaacaggctgaacaggttgtcaaagggcttgaagcgaaatcgaaagatatcaccgcgatcctgcgcgtcataaacggaatcgccgatcaaacgaatttattagctctgaacgccgccatcgaggcagcgcgggccggcgaatcaggcagaggcttctcggttgtcgctgaagaagtcagaaagcttgcggctcaatcagcgggatcggcaaaagaaatcgaagcgctgattcaggatatcgttaaggaaatcgaacattcgctcaacatgttcaaatcggtcaaccaggaagtacagtcaggactcgaaattaccgaagaaacggaatctagttttaaacacatttacgacatgacaaacgaaatcgcaggcaagctgcaaacgatgaatgccgccgtagagcatttatcaacaggttctcacgaaatatccgatgcggtcgaagagatcgccgacgtatcgcgtgaaagctctgccggcattcaggacatcgccgcttcagcggaagaacagctggcttccatggaagaaatcagctcatccgctgcaacgctcgaacagatggctgaagagctgcgcgatttaacgaaaaagtttaagatttgatgaaaagaggctgctggtcagcctcttttttcagttctatcttcaagaattttcagaaatactttttaaagttttttaatatgcaaaagtaaatgaaagctccgatattagtttcataatctagaagctaaaggagttatactaaatgaaaaagatattggactggcttaaacgtccgtctatctcaaaaaggctgtttttcagctttatattggttttaactttgccgattttggccttatcctatagtgcgtaccaaacggcgggaagctctcttgaaacggaaatcatgagaagcgcacgcgataatgtcgaacagctgaatgagatcatagaccagaatatcggagagaaagaggaggccgtctcctttttcagcggcttggtaaatgaaaagctttatcaagaaaaagagaacgcatcactcgtagaaagactcgagcagtacgccaagctgaatcaggatgtggaagcgatctacacaggttcaaaagacggcaagttcatccgatatcccgccgagaaaatggcgaaaggctataacccggcggacagggactggtataagcaagccgttgaaaataaaggaaaggtgatcatcacaaacccttataaaacagcgtcaaccggaacgatggtcattacgattgcgaagcagacggaggacggctcaggagttgttgccgtcaacatgaaaatcgatgaactcatcaaagcgacagagcgcgtcaacatcggaaaaagcggctttgcgtttatttcaagcaatgacaaaaaatatgttgcccatccgacaatcgaagccggaaccgaaggcaaaggcgactgggttggacaaatgtacggcagtgagaaaggcgattttcaatatacatttgaaggaaaagaaaagaaaatggcttttacgacgaacaagctgaccggctggaaaatcggcggaacgatgttcacagatgagatatcagaggccgcccagcccgtcttccacatggcgataatcattttggcagcggcgatcgtgctcggcggcattctcatctactttattatccgcggaatcagcaagccgttaagcgagctcgtgtcatccgcaaagagcatcagcggaggcgatttgacgcaaaaaatcgaagtccgttcaaaagacgaattcggtcagctcggtacaagctttaatgaaatggccgaatcgctgagatctttaatcagcgtcatccaatcatcagttgacaatgtagcttcttcatctgaagagcttcatgccagcgcggcgcagacaagcaaagcgactgagcatattacaatggccattgaacaattttccgacggaaatgaaagccagaaagaaaaagtggaagcgagctcgcatcagctgaatgaaatgaacaacgggttatatgacatgtcaaaaacatcagctgcgattaccgatgcgtcgctgaaatcgactgagattgccggcaaaggagaagagcttgttcaaaagacggtcggccaaatgaattcgatcgatcggtctgtcaagcaagcggaagccgtcgtcaaaggactggaagctaaatccaaagatatcacaagcattttgcgcgtgattaacggaatcgccgaccaaacgaatctgctggcgctcaatgccgcgatcgaagcggcaagggccggagaatcgggccgcggcttttcggtagtggcggaagaagtcaggaagctcgccgcacaatccgccgactcggcgaaggaaattgaacatttaattcaggaaatcgtcaaggagatcgacaactccctgaacatgttcaaatcggtcaatcatgaagtacagtcaggacttcgaatcaccgatgaaacagagacaagcttcaaaacgatttacgatatgaccaatgatatcgctggcaagctgcagaccatgaatgccgctgtcgaacaattgacgcaaggctcccgccaagttgcgggcgcggtcgaagaaatcgctgatgtatcgagagaaagttcggcaagcattcaggacatcgctgcttcagctgaggaacagcttgcttcaatggaagagatcagcgcatcctccacgacactggcggagctggctgaagaactgcgtgatttgacacgcaaatttaagattgaatagctttaaaacatccggttatccgccggatgttttttagttattttagactataaaaagttataaaatccatataaaaacttttaagagaatccgatattaggaatataacagaaaagaggagtcaacaattatatgtcaaacattgtaaattggatgaaacgtccctccattgcaaagaaattaattctttcattcttgcttatcttaactgttccaatcatcgtcctctcctatagtgcgtatcaaactgcaagcagtacgcttgacggggaaattatggacaatgcgcgtgaaaacgttaatcagctgaatgaaatcatcaatcagaatatcagccagaaaacaaacgccatgtcctatttcagcgggttcattaacgaaaactcttttaaagggaaggaaagcgactctttgaaagtgaaattcgaacagttcgccaagctccatcccgacgttgaaggaatctttaccggatcaaaggacgggaagttcatccgctacccggatcaaaagatgccgagcggatataatccggtagagcgggactggtataaaaaagccgctgaacacaagggcgaagtcgttatcacagacccctacaaaacggcgtcaaccggaacggtggttatcaccatcgccaagatgcatgaggacggctccggcgttgtcgccgtcaatatgaaaatcgaagagctcattaaagcgacagaacgcgtaaccatcgggaaaaaaggctttgcctttatcacgagcgctgataaaaagtttgtcgcccacccgaaacatgatgcgggctcagatgtcgaaggcggctgggtggaaaaggtatacgccaatgacaaaggaacattcaaatacacgcttgacggcgaaaaacagatggctttcgcgaccaataagctgaccggctggaaaatcggcggaaccatttacatcactgaattaaaagaagcgtcacagcctgtgctgaatgccgctctgattacgttgggcgccagcatcatcatcggcgtgcttctcatgattctcattataagatcgatcacagggccgctccgcgaactcgtttcctctgcgaaaagcatcagcggaggcgacctgacgcaaaaaatcactgtccgttcaaaagatgaaatcggacagctcggcacaagcttcaacgatatggctgaatcgctgagctctttaatcagcgttattcagacatcggttgaaaacgtcgcttcttcttcagagcagctgactgcgagcgcggatcagacaagcaaggcgacagaacatattacatctgcgatcgaacaattttcaaacggaaatgaaagccaaaatgaaaaagtggaaatcagtgcgcagcagctggccgacatgaacagccgcttgcatgaaatgtccaaagtctcagcatccattacagaatcatccattcaatcgacggacattgccggtacaggcggggagcttgttcaaaaaacggtcggacagatgaattccattgatcattccgttaaacaagcggaatccgtcgtgaaaggacttgaaagcaaatcaaaagacattacggcgattctgcgggtgatcaacggcatcgcagaccagacgaatttgctcgcattaaacgcagcaattgaagccgcaagagccggtgaagccggaagagggttttctgtagttgccgaagaagtgcgcaaactggctgagcaatcagcgtcctcggcaaaagaaatcgaagcgctcattcaggaaatcgtcaatgaaatcggaaagtcgctggacatgttccaggacgtcaaccgtgaagtacagtcgggactcaccatcacagatgaaacagacacaagctttaaacagatttatgacatgacaaacgaaatcgcgggcaagctgcagacgatgaatgcggcggttgaagagctgtcagaagggtcgcagcaagttgcgggagcggttgaagaaattgcagacgtatcgcgtgaaagctcaggaagcattcaagacatcgccgcttcggctgaagaacagctcgcttcaatggaagaaatcagttcttctgcggctacgcttgaacaaatggctgaagaactgcgcgatttaacgaaaaaatttaagattgactaaacatcaggcttccgccgatccggcagccttttgcccgggaaaagcatctttttaaaggaacggggaagggtataaataggtttaaacagactgtcatctatcgtacactggttgtacaggaggggatcaatcatgcgactggaaggcaagaaagtgatcgcgcttgtcagcgatgaattcgaagatttagaactgtggtatccagttttaaggttgaaggaagaaggagcgatcgtacatttcattggtgaaaaagcggatcatgaatacaagggcaaatacggagtgcccgctgtctcagattatgagctgaaaagcgtgaacattgaggaatacgacgccgttctggttccgggaggctgggcgcctgacaagctcagaagatatcccaaggtcctggagatgattcggtggttcaacgaaaggaagaagcccatcggacaaatctgccatgccggctgggtgctgatttctgcaggaatattggaaggcaggaaggttacaagcacaccggggattaaagacgatatggaaaatgccggagccatatgggtgaatgaagcagcggtcgtcgacggccatatcgtgtcaagccgccgcccgccggacctgccgatctatgtcaaagcctttgccgatcttttggcgcagtcctaaaacagatgagccgcccgttcattcgagccggggcggctcatttgctacatgtgatcagcggggaaaacgagaccgatctgtttgcgcgcttcatctatgaccgccaatgtgtctatagaacgttcaaacgtgttaagcgaagactcgatccgcccttgtttaattaaattgatgaattcctctgtttcataaaacatggccggtttgtcatcaggcagcgtaagatgttcaacccgaccgtcccgatagcggatgtcgacttgttcggggcggtggattttatcgatgacgatagagccttcttctccttgaatttcagccgggatgaaggaatttgagattttcgagtgcatcagtacggcttcgtgctccttgtattttaacagcactgttccttcaccgtccgcccctgactcaaggatcagcccgttcgctttgacttcgaggggtttgccgaacaggacgatcgcgggatgaacgccatagacgccgatatccatcaaggaaccgttcgataaagccggattaaatgcgtttaagacggttccgtttcgataggcgtcatagcgggaagagtattggcagtagctggctgtaaaacggcggactttgccgattttgtgcaggttgcgactgatgtttttaaaattcggaagaaacgtcgttttcatcgcttccataaatgttacgcggtgttcctgcgctgtttttaccatttcttccgcttctttgacatgggacgcaagcggtttttcgcacaggacgtgttttccgcttttcatgaatgtaactgcctgatctttatgtaaagagttgggacttgcgatatataccgcatcaataacatcgctctcagccatttctccgatatcggtaaaaaccgcctcggctccgtatttctgcgcgaattcacgtccgcgctctccggtccttgaatataccgcggttaattgaaaatcttcgatcaaacgggccgccccaagaaaccggtcggtaatccaatttgttccgactaccccgaaccgcatcatgctattttcccctttcgctgtaggatatgtttattatacagtgttttcttttgccggcgaaagacaaaaagacggaaacgccggcgtatatctatataacaataaacgttttcaagcggaaaaaaagaccaatagcaatggttttatttttagtatgaggagtaatagtgtacaatttaatttataaaaccaacgttaatggaggatcgccatggactctttgcatatgtggggcggcaggtttaaaaagttttttttagacaataaattcgtcctgtttctgcttattctgcttttgatcggactgaacatccttgtatttacaaaagcatcgtttattttcacgcctttcatcgttcttgtggaaaccatcgctctgcctgtcgtgctgacaggtgtcgtttattatttgttaaatccgatcgttgattttctagagcggaaaaacgtgaaaagaatttattcgattcttcttctctacattgtgatcatcggtctgatcacgatttcgatcgtctctgttatcccgctgttaagggaacagatcacaagccttgtcgataacttcccaaggtatgtccacattgtggaagaccaaattaaacagctgatcggaagccagttctttaatcaggtccagcagacgatgaacatcaatctgaccgatttggcaagcaaattatccgatcaggctaccaccattttaaacagtacgtttaccggtgtgggaacgttcataggcgccgtgacagaggtcgtgatttcgattgtgaccgtgccgtttatcctgttttacttgttgaaagacggcaaaaaactgccgctgtttattctaaaactcataccggtccgcctgcgggagcagacgtatgtgatgatgtccgagatgaatcaccggctgagttcgtatatcagggggcagatcatcgtcagcttctgtatcggctgcctgttgtttatcggatatatgatcatcggtcttgattatgcttctcttttggcccttgtggcggcgtgtacgagcatcgttccgtatctcggaccgacgattgcgattacgccggcaatcatcatcgctttggtcacttctccgtttatgcttgtgaagctgatcatcgtttggactgtggtgcagctgtttgaaggaaaatttatttcgccgcagattatgggaaaaaacctgcacatccatccggtaacaatcatctttgtgctgctgacggcagccaagctgttcggcgtgatcggcgtcattctcgccatccccggatacgcggtcatcaaagtggttgtcacgcatttatttgaatggtttaaacagcgttcacacctttacgaaaaaaacgaagaagtctgaatcccgcttgcataatcggcttttaatataaatagtttattagaggacaagttttaaggaagcgaaaggaatgacatatgaacatttgggatattattgtcgctatcatacttggaattgttgaaggattaaccgaatatgcccctgtatcgtcaacagggcatatgattattgttgacgatgtctggctgaaatcgaaagaactgcttacgccggaggcggcgaatacctttaaagtcgtgattcagctcggctccatccttgccgtcgccatcgtatttaaagaccggattctcaatcttttaggcatgaagaaaaacattacggaagagcagaaatcgggaaaccgcctttccatcgcccaaatcgctgtaggccttgttcccgccgctgtgcttggatttttatttgaagactatattgatcaatacttgttttccgtccgcaccgttgcggtcggtctcatcgccggtgcggtgctgatgctcgcagccgactggatcaatcggcgcaaggatacgacagattcggttgataggatgacgtataagcaggcgcttggcatggggctgtttcaatgtctggcgctttggccgggcttctcgcgctcgggttcgacgatttcaggcggggttattctcggcttgagccacagagcggccgctgatttcaccttcatcatggcgattccgatcatgatgggtgcaagcctgctctctttaatcaaaaactgggcatatttgagtgcagacctgttgcctttctttatcgcagggtttatcagcgcttttattgtcgctctttttgtcgtccgttttttcctccggctgatcaacaagatcaagctggttccgtttgccatctatcgaatcgttttagggctgcttctgttcattttgtttctgtaagagtgaaaatgcgaaccgatttccggctggaaatcggttttgttatgggtaaaaagaatgatattctattatttcccactgtaaaaccgcctgccaacttactatactagtaagagggaggagatattgaaatgtttattatcgcatgtttattgattatcttaggcctcatgccttttttatataaagcgaaccacaatacaaaagatgtgaaagtcaacacgatttcggtcgagcgcgtgcaggctcccgctttaaagaaaaagctgaacattcttcatctgtccgatcttcatttagaaaacatttcgatttcacctgaacggattcttgaacttgccaataaaaaacgagtggatctcattgctttaacaggagattttcttgataggaagagaaatattccaaagcttgcaaactacttaaaagctttgaaaaaactgaagccggcatacgggatgtacgctgtattcggcaaccatgactacctattgaaagaggaacactttcggaagctgaaacgtgtactggaagataacggatgcatcaccctacagaaccagcatgtctccattgaagtggaaggcgagacactcaacattatcgggattgatgattacagcacgaagcgaagcgatattgccggttcatataaagggcttaaagagggctacaaccttgtattgacgcatgatccgaacgttgtgcttgatatgcaggaatttcactttgactatcttctttcaggacattttcacggcggtcagattcattggccgaagccttatcatctcgtgaagatgggaaagcttgtgcgaatgaatatgataaaaggtcttcactaccatcatgacaaaccgttttatatcagcgagggattgggtcagactggggcgaacatccgaatcggaagccgtccggaaatgacgttccatcacatttcataaaaagaagaggctgttgcatttttttgcatcagtctcttttttatttatttctgcagataggacttgaacaatttttctttcgaaataaacaaatattgggaaggggggattttgcgaagagaaaattgctttgttgttaaatataagatcggaatctgcgtcagcttcttgaacactctgtaaaactggttcgcaggctcaaccgcttcaaaaccgagcctctcaactcctttatgcagcgtagtgatgccgatgatgcctttaatttggtctgaccggtgatgatttttgatatattcggccaagatcggcattgaaaaatacgctttttgataaatgagaatgcctcttctgacagcgctctcaatattttgaagctccttgatcagcttaatattgtgcagatgaattttgatcagaacatcgtttttcttaataaccgtcccatcgcttaacaccacatcgatccctttgtactttgttagacggacgcgaaaaatgcgcgttttcgtttggtcaatgagtgtcagtcttgaaaaaaaataataaaacgggtcaattacactccaaattgacaaaaaacagtttctcaagtcgtcactttcctttcctgaaaaaatacacttatattttggctggatatttgaaaaatataaatggaaaacatttttcttctgaaatggaggatggagatgacaaagattctgattttcccttttttaagcatttccaccggtcatcatcacgttgccgattcgctgcagacagaactgctcctcaaatcccatcactgtgaaaaaatcgacattttttcacatgcttatcggcggctggaaaaggcctcctctgcggcatatttgtcatggattcagtattttccgaaagtctacagctcggtctatcatctcctggcgtgcgggcgccatgaaacggcaaagcgccacctcttgtatgagctgatctttttgaaaggcatgcagcagattattgcagaaaaaaagcctgatatcgtgttctgtacgcatgcattgccatcctatttgctgaaccgcttaaaaggccaatttcccgacatgaaagtggccaatgtatataccgattttttcgtcaaccgaatctggggaagagagaagattgattatcatttcgcgccgatcaaagacatcaaagaccagctgatcgcagaaggcgttgatgaagagaaaatttttctgaccggaatacctgtgcaccgttcctataaaacggagagaaagcctgggcagcccggtgacaaaaaagcgttttgcaacatcctcataaccggcggaagcatgggggtgggcggcatttttaaactcgtgcgggaactgtcgccgaacggggatgtcgcataccaaatactatgcggaaaaaaccgaaagctctaccggtatgttcgtgatttaaacaatccatatattaaagcgctgccttatatcgaaagcaagactgaaatgaaccgcttatacgcggaggcgtcgggcattattacgaagcccggcggcgtcacgatcagcgagtgcattgaaaaacagctccctgttttcatctatcatgcgctgcccggacaggaagagatgaatctcgatattctgaaaaagaaaaaccttgtcatcgaactgaatcagcaaaaacagcagccgattgaacagcagctgctttcctttttccgttcggatgaagacatcaggcgctatcaaatgagcgtcgatcaatatttgcgcgaaaaatcggaccgtgatttcagcgatattttagacgggatcattcataaccggagcggtttagggaatgctcacgtataagggaggaggaagaacgatgtctgagagcagcaagaaatcagtcgtcatgttgctgatcgattcattaatggatgaaccgctcaaagaagccgtgaaaaacggacaggctcctggactgcaatatttactggaaaacgggcgttatgtgcctgatatgatcagcccttttccgacgatgtctgtcaatgtcgacagcacattgcttacaggggtgtacagcgaccagcacaaagtgcctggccttgtgtggtacaacgcgaaggaaaaacggattatcaattatggcagccacattcgagagcttctgaaattaggcatcaaacaatcctccagagacgtcttttacaatctgaatcaggttcatttaagccaacaggtgaagacgcttcacgaagagcttgacgaaaaaggaatcgaaacgtgctcgatcaatgcgctcttgcacagggggagccgggacggctatttgcagattccctttcttttttcaatgatttccggattaaaccggtcagtcaaaatcaacgcatcccagctgttttcgtacggcggtttttccaaagtgaatccggccaaccgctcgcttttcaaaaaattcggttttaacgaccgattttcaaccaatgaattggtctatctgattcaaacaaacaaagtaccgcctcttgcactcgtctattttcccgatctcgaccagcacgtgcataaacacgggaggaacgacgcagcgggggtggcgaaagccgaccggcatgttcaaaggattttagacagtttttcgtcatgggaagccgctttaaaggatcacatttggatcgtgatgggggacaacggacaggcctggatcagcggcaataaaaaagaagcattgattgatttgagaagccttttggacgcctttcgcattgtgaaattaaagaaaggtgtgacggccgatgacgacatcgttcttgcagttaacgaaagaatggcgttcatctattcgctcgataaagcgaagcttccgctcaagaggatagcggacattctgcaaaaggacgaacggatcgacatcatctgctggaaaaatgaagcggattcaattgaggccgtttcgggggagcagcacgggaagctcacatttcggccgggaggcaaatgcacggacgaatttggacaaacgtggacgctggaaggggatttacatattctcgatttgacggttgagcagaacagcctgacatacggaaaatttcctgatgcgctggccagactgtacgcttcatttttttctcatgaaggcgattatttgatcgccaatgcaaagcccggatacgaatttatcggcgaagggtcgccgacgcacgtcggaggagccagccacggtgcactgcataagcaggacaccctcgtctccatgatcatcaccggaaccgatacaatgccggcatacaatcgtcttgtcgatataaaagaatggatcctcgatttagtcaaatcacggggagcgggggaatgactaaagccccctccccgccattatgacggttgtctgatgcctttgacaaatgctgcaagcgccgaagcgatcatcacaaaaagtgaaactgcctttatgattgtctgtaagagcgcatgttctacgacaatgttggagtgcacacataatgccaaaataaatatggcaatcaatgaaccgtatttttcccccataaccgtttctcctttcgagccgtcatcctccaaagaacaggtcgagaatgtttccggcggttgaagattgtttattgtacagctctgaatacccgcagtttttgcaataaacgacgagaaaacggttatgctgcacatcgaacaattttgacaggccggtgccggtcgtcgcgatttctttttgccccgcatctgtgcttccgcacttgatacatcctttatgttcacgcatggcgcttctcctttcgcgatgtaaaatccaaccaagttcattataatggaatgttcttcaaaagaaaatatttctcaggaaatgatcggccggaaaacaaggaaaatcagactggatctttttgcttataaaagatccttatcgactggtaattttatttttgtgccgcggaaaacaattcttttaacctattcattcgtctgggaccatcctgtaagataaacctattacaatatcatccactagaggaaaatagtttttattgactaggataaacgaaaggggaagctgctttgagcgaaggtttttgggattcagtaggcaactttttacacatatcctacacggaaaatgaacgaaaacgcgatgagtataaaaatttatacgactatttatctgataaagaaagcgatgtcaagacgaaattagcagaaattgatgcaagtttgaaggcttaccacagcaatctcccggacttgaaaatcccttcacacgaatttgaggatacccgccatgaaaaggatgccaagctgaaggaattggtcaagcattttaaagatatggtcgatgacatccaaagcgccaagacgaaggcgaaaagcaagtgggagtattataaagcaaaagctgaagctgaagagaaaaaggcgtagaggaggaacagccgagtcatggacggatatggatactacaactatcaagcggcgaatccgaaagtaagcggagagactgtgaaaatttcacacaatggaacaataaaagcgcattcccatgcgaaagcgatcgaaaaacatgtcggcgattcgctcaaaaaagcaaaggaattgaaagcgtacgtcgaaagcggcaaatggagcgggaaaacccgcgacgcatttttaagctaccttgagctgattattgaattgaatgccgatatgaaagacgccttgaaagagcataccgctgcattagatgcgctggaaaaacacatcgacggtttttcgcagctcagtgaagtgcaggaaatcaaaaacttataacagggaaggagaatgacatgcaggtgaaagcagatacgctgtcggcggcagaactgtatgttttagcaggagcagccggagtttcctacatattcggtcttccggaacgcgaacagctggccttggtcgagccggattgtgcaataaaagcaaaggacagcctgattgaaaaaggcattcttttaaaggaaggcaagctgaccaagaccgctttttttctgattaagctgctgcaacattaccaagaaagcggagaatacgtgcgctttaataacgtgatgtgcgcatttctgtcggacgacgaggagcgcgttatcgccctgactgaaataagcccgggcaaagggtacacattagattatgtggaaaagcgcgaagtttatttatcgctcatttcaaaggtgtcatttttagtaagggagccgcgtgatcaagaccgcgcctttttgacaaaaccgatgagcgccgctgaaaaagcggaagtcagggcaatgaatcttgatgaaaaagaagttcttgctgtggaaacgttcaagctagcctcacagcaaaaaccggcagaccccggcttccagacgacaacactttactttacaaaaggcgaagacttcatctcggttgatcctttaaatgatcgatatgaatggatcagcctttatatcatgaacaaccggatctatgatgcactgcagatcaatttcagagcagggagggcgatgatatgaatgcagaaggcggagcaggaggcggcggtacaaacatccatctcgagtttgaagaaatgatcaccatttccaataagctgaaaagcatctgcgatatttatacagaaggggttcagaaggaaatcaaaaacctctcagaatccgatttttataaagccggacaagcatcaaaagcgattgaaagctacgcggatattctcggaaagacgatggagctgtttgataattactgtatagcttcccacattgtcagttatgcgatggagaaaatgtatgaaacagataaagagctccaaaaactctacaagattcagaaatagaaatgaggcgatcatctaaatggatgtgaaatacgtaccggaagaatggcagggcatgaaagacggtcttgatgcgctgacgggcggccaatacggcggcggtatgaaatccggccttataaaactcaatgatctcttggaagatatcgaatccaaaatcaaagacaaggacagcgacaggtcgatcagctttacccacaccagcaaaaaaagcaagatcgaggaactgtttaaggattatcaaaagctggccgacttttgcctgaaagccggcagtttggtggcagaccacattgacagccctttttataaaaaaatagacgcgttcgccgaaaaaatgcgcggactgaccatacataattacaccaccgtaaaccggatcggctccaaggaaaccacttacgtcggatacggcatgtccaagcaagcggttgaaaccgacaaagcgaaagtgagcgtaaatgatatcttcaaagactcggaatcgtttgatcacgtactgagcaaagaatttgaagaattccagatcaaccaccccgacattgagttatcgtatgaagaatacacgaaagcgattgcctcttcccgcggatttgaatacgaatcaatcggcgatgtccaaaagaatcaggaattatggcgggatcttctggccggagcaggcattatcgtgctcaccatcttttgcgcaccggcaggtctcacggtggccgtcgcctacggaggagccaatatcgcgagcgcggcaacaggaaaagactggatgacgcagcgggagttaaacacaggcgaaaggtttgaaagaggcgtgttcggcgcccttgacatcatcccaggcgctgccgcggcgaaaggctcatttaaaagcgcagccacaatcggccaaatttcaagcaaaacagaacatgtggtacaatctcttaaagacagcaaaaacatctgggcgaaccgcatgaaggtgaatgggctgaaagcccaagaccggctcaacgatgcaggcttcgccattaaaaaacaattcgccaaaagcgccgacgccttgagcgatattgcccgcggtgcggaagcaggagcaggcggcaccctcgtccgaaaagggtccaattactccgcccacgtcaacgacgcccataaggcttcgaaaacgaagattcaggattcgattcagcgggttgagaaggagattgaggctggatccagcaaagctgttaaagaaataagtaaagcagataaggcaaaactggaaggctggtcttatcctccaagtgaagaaaaatatttaaaatacaaagaggtttatgataatcccaaatactataatcaagagactggagacatcaattggccgccaaataacggatttgatggtgagcctgtgaaaatgaaactagaacaaggaaccattattgatagatatggaggcccgaatggaacctttgtttctccagcggggattccatacgaacaaagggctttagctttacatagtgatgatgcaccttatcataaatacaaaacattaatagaatttgaagtcgaaggtgggaaaattgctccttggtttgataggcctggaggaggcattcaatacttcacaggaaatacaaaaattaagcatttagaaacgggtgaattgttcgaagctaccgtcgaaaatttattgaaattaggttatataagggaaattaaataaaaggggtggacttttagtgaatattaatcaaacacataaaattttgaataagttggggaaatcaactactcttgaagatagttgcattaaagagaatgttgctccgtatgaaaatttttatatattgaagaaagacaaagataaatgggtttatggtttgtttatggttgaaagacaaaataatccttatttgcaaataacaaaagaatttgacaatgaagttgaaggggcaaaacactttttattggataggttatcttctttttattttttagaaaagtttcagctttttgtgatggaacatgaagagttggatataggtggacctacattcgatcaaagtaaactttttgaaggcatgtatatattagggatccctgcttctttatttgttttgggacaatcacaagtaaaaaatagagcgattatgctagagaagaaagacgaaacaagttcaattgtctcttttgtcaacgataaaggtaatgtgattcaatctacagtagcaatccaaaatcaaagagcactgtttattgcgttcaaaaaagtttatttgctttatcaatttgaaaatgaagtgaaaaacttgttggaaactgaaggaatagcaaataatttctctgaaggagacataaatacttttctttcgtagaatttttcatcggtcactataacagagggttttgttttaatttaatatctttctgaaaatgaaaaaggaaacgacaagttagatagaatagttagtgaattttttaataattaattaaatggattttctaaaccgaaatttgaaaaatgaagagcaaaaaaactaaaacgcatggaaatcgatctccatgcgttttaaagattatctaacaaagcaggtgtgccaaatgaaaagacgaacaataccgtttcagtggaacgaagataaccatttatctaactttagaaaaagactgtactccactatcattggcggaattatcggtgatgcactgggcgtccctgtggaatttaaagccagaaacttaaatataactggaatgacagggtacgggacatataatcagccgcctggaacatggtcagatgatacatcactcactttgtgtttaatggagaatctgatcgaagaaaaagatgagaccgaattgatgaaaaagtttgctgcgtatcgggaagggtattggactccatacggcagcatgtttgatattggcagagccactgatgatgcaatcgagcgtttcaaaaggggtgttccgattgaacaatgcggcggagcaactgagttcgataatggaaacggagcgttgatgagaatatctccgttggcttttacactatggaacgaatccgatttttcaaaaaggcaagctgagatcgaacggtgggcctttattacacatcgtcatccccgatcaacgctgggatgcttcatttatatagaatttttaataaacttatttgatcattctcctgaagaggcatataaacaagctgttcattcttgtctggagaatttgagaggaaccgagtatgaaaatgagttttctgcgtataagaggatacttaatgatgacattgcgagagttaaaagagaagacattatgtcagacggctatgttgtgcactctttagaagcggcattgtggtgtttcctcaattcagaccgttattctgatgccgtattggaagcagtgaacctaggggaagacacagatacaattgcctttattacaggtacgatggctggaatgtatgatcaaatgaaaagcatcccggaagaatggatcgctgccttggcaaggaaagaagacattctggatttgtctgaaaggttcattcagttctgctttgaaaaatcggagcgatagattgtctatgtgaaaaagaaaatggccggctgacagagcattttctttttcacatcaaaaaccacttgcttttctccaaaattccatctataataaatcatgtctcaaatatacggggcattagctcagctgggagagcgctacactggcagtgtagaggtcagcggttcgagcccgctatgctccatctttaaaacccttgatcattcaagggtttttttgttgccttttttcgcgagccattttcctaggtttatggcctagctgtccgtacggtatttgacgactggccatttttcttttcgcagagcgttcatcagctcagggcctgcatgcaaatgctcttcaaccagttctctcggagtcagcgccatccactgatttaatgaaatgtctgcgaagcggctgcttttgaatatttctaaaaaccacaggctttcgctgcctgtattttgaatgtaatgtcccatggcaaacgggacatatccgacatcccccgcccggtaattaaaggtccgggcagtcccgtttgcggcgaatactgtcattcgcccggtccctgagatatagtactgccattcatcgttgttcgggtgccaatgcatttccctcattccgccgggcttgacttcgacaagcgcggcggcgatcgctgtcgaaatcggaaagtttgaagaatcaacaattcgcaccgttccgccgggtgttacaataggcttttgtgcaaacagcctgtatgcgaagctttttggtacggttccatacgggtccggcactttttggttttcgagcggtcccggcgcttttgcttggaagatgtaccgctgtttgtcggggatgcgggcgaaggcgctttcgtgtacaccgaaattcgcggccagaacatctttcggtgtgtgtgcgaaccaatcggtaatcgtgaaggtatcgaactcggagaagttcccgtcatcaaaaacgaggagaaattcgcagccatcctcaagcccttgaatcgagcgcggtattccggcgggaaagaaccacaaatctccggggccgacatcggcgataaagtttcggccgtcctgatcgacggcggtaatgcgcgcatggcccaaaatcatgtaagcccattccgattgcttatgccaatgcaactcgcgaaccccgcctggcgtcagccgcatattgacgccggcaatcgtcgttgataccggcagttcccgggctgttatttcacgggaccagccgccatgatttaactgcatatgtgtgtctgaaaaagaaaactttaaattagggattgctccggcatctgtttttggaggaacgaacatgtcgggattctctaaatcccgcatcacgtcgcgggggccaaaatcggtcgcgcccgcaccatcgtttcttattggatgcggcacgtgattgtaccaagctggagtcccggctgttcttttcatgcggaaagctcccttcacaggtcgtgtataccgaaatttatgacagggacgcttaaaatatatcaaatcggagccttattaagacacttttaaaaaactagatggacagatttgcatttcctttggcagcagaaggaaaccttcgatttaaagtctgcacggcacgggctcctgctgtttgccttccaccgctaacgattactggctgaatgatttcgcccgaagctgaataagaatgagatagaaagcatccgggcaattttcgaacggctacatgaaatgaatactatgggacaagaaagaagggagcgttgatgaaaaagctttgccgtgaagtttgggtagaggtaaatcttgatgcgatcaaaaaaaatttgcgcgcgtttcggcggcatattccgaaaaagagcaaaattatggctgtcgtaaaagcgaatgcttatggtcacggatcggtggaagttgcacgccatgcacttgaacatggtgcgagtgagctcgccgttgcctcggtggaggaagcggtcgttttacgaaaagcggggattaaagcgccgatccttgtgcttggtttcaccccgctgagctgtgtgaaagaagcggcagcttggaatatatcgttatcagcttttcaagttgactggattaaagaagcgaacgagatattggaaaatgaagcagatcctaaccggctggctgttcatatcaatgtggataccggcatggggcgtttaggtgtacgaacaaaggaaaagcttttagcaatcgtggaagcgctgacggcaagtgaaaacctcgaatgggaaggaatttttacgcatttttccacagctgacgaaccggatactgagctaaccatgattcaacacgaaaagtttatcagctttcttcgctttctgaaagaacaaggctttaagctgcctacggtgcatatgaacaatacggccgcggcgatcgcttttccggaattcagcgctgatatgattcgcttaggcatcggaatgtatggattatatccttccgattatatcaggcagcttaatctcgttaagcttgtgcctgcactaagcttgaaggcgcgaatcgcttatgtgaaaaccatgttgactgaaccgcggacggttagttatggtgctacatatgttgcagagcgcggggaagtcattgccacaattccggtcggctatgctgacggctattcccgtgaactttccaaccgcggttttattcttcatcgaggaagacgagtgccggtggcgggaagagtaacaatggatatgataatggtcagtctgggagagggtgaaggtaaacaaggagaggaagtcgtgatttacggccggcaaaagggagcagagatatctgttgatgaaattgcggaaatgcttgatacgatcaactatgaagtggtatctaccataagctggcgcgtccctcgtttttatataagagacggcgagatttttaaaaagtcgaccccgctgttatacgtgtagttttcccatactcacaggccgtttgctcgatcattgatcaaaataaaaaagagcaatttcttgacaaaaaaatttatttatgctataatttactaattaaatattggtgtgtataataggattctcctggccgggagaatcctatttttttgcgtttatgaaggagtgtccgacatgaaaaaagatgaatcgagtataacgtcccttatttcggcttttggcagagcttatcacagccagtatgatgaaccaaaaatctttgatgataatctggccaaatcgctcatttcccaacaagaatttgctgatatcaaaaacagcttcattcaaggcatacagttcttcaacaaagctatagcggaaaaatacgagggagacgatgaagaaatattaagatggatcacacaagttcagctctctccgatgccgctcgcccgtgccgcttattgcgaaagagtgctgcatcatgagattcggcttgggacagaacaatacgtgattcttggggcagggctggatactttctgttttcggaacctagagttaaaggacaaaattgatatctttgaaattgaccacccagcgacacagaaattgaaaaaggaaaagctggacaaagccggttttcacatcccggaccaccttcattttattcctttggactttgccaagtcgttttcttatcaagaattggctgataagggttttcattttaacaaaaaaacgttcttcagctttttaggcgtttcttactacttaacaaaggaagaaaccgaaaaactgctcggggaattaatggctgacctcccttcaggcagttcgatcgttttcgattatgctgatgaaaacttgtttaaagagaaaggcttcttcaacagggtggaaaatatggtaaaaatggcagcggcaggaggagaaccgatgaaatcatgctattcgtatcagaaaatacagcacatgctgcagcaatccggactgctcgtttacgagcatttatcaccttcagatattcaagggcgttattttaaaaatcgaaaagatgatctgtcagcctttgaaacgattcattacattcatgccgtaaaaaaataaacataaatctagaaaaacgcccggggccgggcgtttttcctatttaagccgcgcggtcgtctttctgtttttcttgggggagtacaagctgtttaggagggcatttgcgctgcgtcaattcggacacagcgaagatcgtcataaatgctgtgactgcagccagcgtccggaaaggaaagaggaccgtgccgtcttcaatcatcggatacggcagaagcggcggaatgccgaatgcgggttcaccaccgccgagcctcagaatgactgcaactgcaaatccagcaatcgacccgtaaagatttgctcttttataaaagagggccattgttaactggggaaaaagaatgcaataaactaaatccgaagccaaataccataaagtataaacgcttttgacattcagcgcgatgaccgctgctcccgcgccgaacaaaatgattgagcgtttgacgactttttgcagctgtttttgggtggccttcggcttgatgagcggacggtaaatattccatgcggccattgatgatgccgatagaatcgatgagtccatgcttgacatgacggctgctgcgattgcacccaagccgaggcctgcgatgattcctggcgtcaaatacgcaagcgtttgcggcaaaatcatcgccgggttatccggagcgctcgctccgaacaggctccaatcggtactgtttccggcagctccgatgattacgcacggaatggcggcaatgatgcagatcactccggcaattatcgactgccacatggcggcgctttccgattttgccgaaagaacgcgctgaaagtacacctgccatgcgatacctccgaaaattaagaggagcgcattatcccaccagttccaaaacaggtttccccaatccgggtttttccagccgtccaacggcggaagcagattggcgctgctgccgaaatcgtgcctgtaatttgcccatacgctatcgagagcaccgacattcgacaatacaaatgggacgactaaaaacagcccgagcaaaatgacaatcatttgaaagacatctgtgaaagcaactgcccacatgcctccggccaccgtataagcgatggcgatcatcgccgaaagaataatcgacgtttggaaatcgatattcagaatcattccgaaagtcgtgcccaatgccgttaagatcgcggcgctccaaaacaattctcctaacagcgccggtatatataaaacgccggccatccgcttaccgaagcgctgttcgagaggatcgataatggtcataaattgatgacggcgcatttttctggcgaagaaaataccgccgataatcaggctcaatgtgtagccccaaggcgcttgggcccagatgaggccgtcgctgtaagtcgattcggccgttccgttaatatatccgccgccgacccatgttgcggccatcgtcaccattccgacgaaaaacggcatgctcctttttgccacgatcatatcggaaaaagaatttgatttctttgctgcgtaaaaagcgcctaaataataggtgaaagcaaagaatatcatcatggagataaagccgccccaatgaatgtccgcattcgaaatgccgatatacgcgagtatgcctcccgcaaacagcgcaaaaatacctaatttgatccagttttttttcttctcagcataattcatgtatgcacatcgcctccgaaaatattttttgaattttcttgaaattaaaatatgaaaaaaggttttgccccactctgggaagtatgcaaattgctgacttcagagcggataaaacctttttatttcttgttatcaatcggtataaactcaaaaatctctccggattggacagatttagcgagtctcagcagccagtcataatacggttttgaatgttcaagctggtcataaagagttctcgcttcctcttttatgctttcgtcaagcccttcgctttcgatgatgtcctccaatgctttttgagcgtcttgaatagccatgagattcactttgacttccctttcccattttttagggaaaaagcttgtgaaaaatttgaagaaatccttttcagcaacaaagctgtgttttcttcttcctctgtggaatgtctttttgacgacgtttaagtcttggagcttttttacgcttgtgctcatgctgggcttgctcatttgcagttcttcccgcatttcgtccagcgtcatttcatccgaaaggtacatcgttccgtacaaaatgcccgcactccgggtaatgccgtacagatccattgtttctgcgattgaatcaatgacaagatcttttgcctgtgcgatcgtttcttttgctgaaacatcacggggattgtccataacttgcctcctttcacaggagcggaacatcggcattgcagattcaatgccccccgaaaaatcggggattgttctaaaatccgcgttaagtttgttaagttatttctgtacgttctttatcttaacgaaagaaattgaaatgtcaaaatcaaaaatttttttcaaacggtctcagcccatgtgagctctgcattcacataaaattcaaaaaaaataatcagcctgatttgctttgacacaaaaaatggcgcatgataaattcaaagtgttcaaaacattaaatttttatttaacaaactttgcgtaatgaggaggctgcttttatgagtcaaacacttttcattgacggaaagtgggtgggcgccaaaaaaggcgagactcgccaaattatcaatccttacaatcaagagcatattgaaaccgtcagtgaaggagacagagaagacgctgttagggcgattgctgcagcgcgccgcgcatttgacgacggcgagtgggcgaatacgccgggtcttgaacgaggcaacatcgtattaaagatcgccgaactgatcagacgcgaccacgaagagctggcagaacttgaatcgcttgataccggcaagacgattgaagaaagcagagccgatatggatgatattgcaaacgtatttcaatattatgcagggcttgcggataaagacggcggagaagtcatttcttcaccgatccccgattctaaaagcaaaattgtcagggagccggtcggtgtctgcgggcagatcacaccgtggaactatccgctcctgcaggcaagctggaaaatcgctccggctttggcggcgggcaacacgatcgttgtcaaaccaagtgaaatcacaccgctgacaaccattaagatcttcaagctgatggaagaagccggtgtgcctgaaggggtggccaaccttgttctcggccccggggcgactgtcggcgatgaacttgccagaaataaagacgtcgacttaatttccttcaccggcggaattgaaaccggaaagaaaatcatgcaggctgcaagtacgaatgtgaaaaaaattgcgcttgagcttggcgggaaaaatccgaatattgtgtttaaagacgcagattttgacgtagcggttgaccaggcgctgaatgcggtatttttccacgcaggacaggtttgctctgcgggcgctcgtcttctcgttgaagagtccattcatgatgagtttgtcgcagagcttgtcaagcgtgcgaaaaaaatcaagcttggcaacggatttcacgaggagacacagagcggtccgcttatttcagctgaacaccgcagcaaagttgaaaaatatgtggaaatcggcttgcaagaaggcgccaagctggaaacaggcggaaaacgtccggaggaccctgaacttgcaaatggcttcttctatctgccgacaatcttctcgagctgtacatcagatatgagaatcgttaaggaagaagtattcggtcctgtattaacagttgaaacatttaaaacagaagaagaggttgtctcacttgcgaacgatacgatttacggccttgccggcgccgtttggtcaaaagacatcgaaaaagcggagcgcgtcgcttccaaactgcgcatgggaaccgtctggatcaatgacttccacccttatttcgcacaagcgccttggggaggttacaagcagtcaggcatcggccgcgagcttggccgcatgggccttgaagaatacacagaagtgaagcatgtctaccgcaatacgaaaccggcggctgtcaattggtttaaagcataagaaggaggagactattcatggctttaaatatgaaagtagaagcgatgaacaaattccacacgtttgaaatccctaccgtcattaagcatggaatcggagccgttaaacatgtgggggaagaagtgaaaaagcttggcgtttcaaaagcgctgcttgtcacagaccctggcatctacaaagccggtgtaacaaacccggtcgttgtatcccttcaggaagcaggcgtagaagttgccgtctttaataaagtcgagccgaatccgcctgtccgtcttgtcgctgaaggttccaaactgtatgctgaagaaaactgcgacggccttgtcgcggtcggcggcggaagctcaatggatacggcgaaagcgatcggagttgaagccactcatgaaggctcagtccttgactatgaagcggcagaaggaaaaaagccgcttgaaaaccggattcctccgcttacaacgatcccgacgactgccggaaccggctcagaagttacacaatgggcggttatcacagatgaagagcgcgaatttaaattcaatacgggcggcccgctgattgcagctcatttgacaattatcgatcctgaattgcatgtatcaatgcctccgcacgtaacagcgatgaccggcgttgacgctttggctcatgccatcgagtgctatacgatgaaatttgcccagccgattactgacgcggtggcccttcttgcgatcgaatacggcgcacattacatccgcagagcgtttgccgatggagaagatcttgaagcgagatacggcatggcgcaggcggccatgcttgcaggcctttcttacggaagcgaatccgcaggcgctgctcacgcgatgagccagacgctcggagggatcatccctgtcgcgcacggccaatgtgtggcggcgatgatgggccctgtaatggaatacaactggaaaggctaccctgaaaaatttgcccgcattgcaaaagcgttcggaattgacacaagcggcatgtctgcagttgaagcggctaaagctgcggtgaactggatgtatcagcttgtggaagacttagagattcctagtcttgaagagcaaggcgtatcacctgacatgatcgaccgcctttcaaaagaagcgatgaaagatccgcaaacggtcggtaaccctagagacctgaacgaaaaagcgtacaattggatttacaaacgctgcttcaatttaaccccgaaaactgtctgaaaaaattgaaaaagcccgttgtgtgcagcacacagcgggctttttcaatttgagaaaaaaagggaggcaatgtaaaataaatcacatcttgaaaaaaaggggatgggttgaatgtggaagaagcgcacggctgtggcggagcacgtatacatagcggacacagcgtcatttgtgacagagaaacaggcaaagatcgtaatcgattacgggggcataccgggggatctgcattttggactgacgaaaaaagccggggcaagggagccgatgtataaaagaggaacggagattttcaacaggaggcagatttctatcgtctcggtagaagagtgccttgaaattgccggacggctgaacattccggcggtccttccggaatggctcggggccaatatcgcattaagcggcctgcctgatttaacctcattaagagaaggaagcagaatcgtttttccaagcggcgcctctttgttgagcgagggcgagaatgagccgtgcattcagcccggagaagtcattcaggagcagtttcccgacaaaccgaagcttgcttcgcgctttgtgcgccatgcgatgggaagaaggggaatcgtctgcatcgttgaacgcccgggcctgatccatcaaggcgaccaagcagaagtgtgggcgtattcgcctgctgccatgaaagacgccaggtcgtttgcctaggcggatgaaaagccccgagtctctaagagccggggctttccgcttattacaacagtttctgcttgacttctttgatctgtttaatatgtcttctttcatgatggccgatgaagtcgagccactgcctgaccgtaagctcttcgaaaatcggatgcggcagcaccctttgaaaatcttcattgtgaaaggcggcgatgactgaagttaattgtgttctgacattgtcgagctcagctttgagggttaaagcatccgctgtttttctttccggctccgcatatggaggcgcctttcgtttggagcttctgtcttccaactgatgaaccggtttatcttcgattgatttaaccggtgcatgtttgatttgttccttcaagatttgaagtgccatcagatcgatttttttcaggtggtcgatcacttcttgaatgctccattcgtcttccgccggccttttattcagcatttcgtctgacaggccttgaatctcgctccaaagttcttttctcgcttcattaaaaatgctcatcatatcccctcctagttttaactgtaccatatcgaaggctggtaaaataaccaaaaaacactcgattttcgcatcgccatcggatatgcttaagaaaaaatgaaaagaaggaaggatttcattttgagaaccacattgtacccgtatatagcattagtggtcggggtgttggctgtgtcttcctccgccatcttcgtcaggctgtcaacagctgatgctggaatcatcgctttttatcgtctctttttttccgctttgctgatctttccttttttctggggaaaaagaaaagaagtcttgggtttttcgaaaaaagactggctgttttccgcggcagcgggattctttttagcatttcattttattttatggtttcgctcgcttgaatacacgtctgtggcgagctcggttgttcttgttacgctgcagccgatcttttcctttatcggtacatattttttatttaaagaaagagtctcgttcgctgggatcatcagtgcgcttctcgcgatcggcggaagcgtgtacatcagctggggggatttcaaagtaagcggccaggcgctctacggcgatatcctggcgcttttggcatgtgcgcttgtgacggcatatctgctgtttggccagcatgtcagaaaacgccacagcttgaccgtttacacttttattgtatatggaatcagcgccctcactttatgtctatactgcctgttttcgggcgccgcctttttttcttatcctgcgtcagattggggttacttctttctgcttgccgtcattccgactttgctcggccactcgctctttaactgggtgctgaaatggctgagcacaaatatgatttctgtggcgattttatttgaacccgtcggagcggttgcgctggcgtattggattttagacgaatccgtcatgatgacgcaggtgatcggcggagcggtcattttttcaggcatcatcctgttcatggcctcgcaaagcatacggaaaaacaacgtcccggcggtgaaagggaaaacgcccaaggcgctttaaagtccgcgctttatccagtcaaaatatcttcgcttgaatagcggatgttttccttttcaggtctggccagggaaaacgccaatgtgagcggcccgagttttccgagaaacataatgaaaacaatcagcatcttcccgataggggacaggtcggccgtaatccccattgacaggccgaccgtgccgaaagctgaaacgacttcaaacaaaatcgccaaaaacggtataggttctgtcatatttaaaataaagatggccgttaaaatcaacagcacgctgattgttgaaatagcgagcgaccggaggatcaattggtctttcagcgtttttttggctattgaaatatgttttttgccctttaaaaaagtgataaccgacagaagaatgacaagaaacgtcgtcagcttgattcctccgccggtcgatgcgctccccgctccgacaaacataagaaggagcaaaagcgtgatcgtgctttcgcgcaggcttccgatgtctgtcgtgttaaatcctgctgttctcggggtcacagcctgaaaataggcgccccaaagtttttcagctagcggaagcattcccagcgttttttgattttgatactcaagcagaaaaataaggatcatggctgccaaattgacgataaacgtaccgtatatcatcaatttcgaatgaaggctcaactttttaaagctccgcttatgccataaatcggacaatacagtaaatcctatcccgccgacgatgaacaaaaaactgatcaccaggttgacgagcggatcgccttcataccgcattaaactgtccggccatatggaaaatcccgcattgttaaaggaggaaaccgcatggaacaggctgtagtagatgccgcgggcgagaccgtattcaggaatccatttgacagcaagtatcagcatggccagcatttcaatcgcgaaggagtaaataaacaaactcttgatcagtttaataatcccgcctaaagaagtctgattaagcgactgctgaatcaacagccgttctttcaggccgatttttttcccgagcatgataaaaatgagcaccgcaaaagacatgatgccgagtcccccgagctggatgagaacgagaataataagctgaccaaacatcgtataatccgtgcctgtatcaacgacggccagaccggtaacagtcatcgccgaggtcgatgtaaaaagcgtatcaatccagcctataggcttgggcgttgctgccggcagcttcaataaaagggttcctaatatgatgaaaaataaaaacactagcacgagcagttgggacgggcttaattgtatctgtttaaacttcacggttaatcgccctttttttcaaaggtctcaatatctttattttgcccgatcacaatcaaaatatcgttttcatatatcatgtcatcagcgctcggtgcgatgatgaaatgcccgtccctttttatgccgacgatattgcagccgaagttggcgcgtacgtcgatatcccccaggcttcttttgtccagctttttagtggccacaatttcgacgatgctgtagtttggcgacagctcgacaaaatcgatcatcttttccgacgtgatatggctggctatccgcttggccatatctttttcaggatgaatgatacgatggacgccgattttatggagaactttttggtgatagtcattttgtgctttcgtccatactttggggacgcccatttcaatcagcaaaagcgaggtcagaatgcttgcttcaatgtcatcgccaaatgatacaaatgcgtggtcaatgttgcgtatcccgatttgtttcaaggtcttttcatcaacggcgttggcgcaaatggtgtaggttgcataagtagaatattcgtttactttttcttctgatttgtcgatgcctaagacttccgccccttttgcgtggaaggctttcacaaggctgccgccgaactggccgagcccgaaaacggcgtaagatttctgcatccgtattcacccttttacctgtttttcttatagtgtttactttttttaagaaaaacacactgggatgtacaagaatccggaaggtgaagccggagggcgctttgaggcggctgcggtgtcagctgatcgatccgcccgtttcgcgaatatctttttcgtgcagggcggagatgaccgcagctattctaagtccttcgacgatcgtttcaaggctgagactcggctcgggtttatcgattgtttgttcggggagaaacggaatgtggatgaaccctccgcggatgtttgccgaggtgcggtctatacggtgcattaactggtaaaagagatggttgcatacgaaagttcccgctgaattggagacggaggccggtattccgttttttctcaactctttcacaatgagcttgatcggaagcgcggaccagtaagcagcaggcccgtctgccgcgatgggttcatcgatcggttcccggtcttcattatccggaatgcgagcatcatcgatgttgattgcgatgcgttccggcgtaatatgagccctgccgcctgcttgccctgcgcaaatgacgacatcgggtttgtgcttttcgatcgcttttttcaaaacggccgctgaatgatgaaaaacggtcggaatctgctccgctgcgatagagacgccttctgcttcctctccgttcagccgttttacagcttcccaggacggattgactgtttctcccccaaaggggtcaaatcctgtcagcagtactttctttcccatatcgatcactcctgaatatgaatgtaaagtgcaaaatacccattcagcagatgtctgaatgggtattttgaggatgtagtcacccgcctgctccacgagaagccaaaagtatctcattgctttgggaagccgcttcaggagcgtgatttgcaaacgaaaagctgaaaacagtgcctaatacaaatacagctaacaacacttttttcatcctattctcctcctcttccggcaagtttacttgccttgtctgttttaatgtagaaatatatggcttcttcgtataacttattttccctatagtaattcgctacgtccatcagcaattcctccagatcaacccatgcttttttatcttctaattggtgaataaagtccttgattacttccagtttattctgacaatcggaatgtaatgtatataaagttttgaattttaattcgaaaatttcgctattcacttcttgagcttttttaaagcctgtgtcgatccatttaaaagcttggtcgggatcgttggttttgaaaagagaccttgtgttttcatatacacatagaaggtaagcatacttggctttcgtttcaaagtctttgattgcaaaagctttattataatacttcagcgcttcttcgtgtttatcttccttactcttcaaaaagcccatattatagtaggtataaggcaaaagatattggtcgccgattttttcggttttttcaattgcttcctttaacaatacttcactttcggcaaacttaaattggtcaatataattgagcccgatcagcattttgcagttgatgacccgcttggcatacccgtcatacccttggaagatgcctgaggcaatgttgatgtggtgaatcgacagccatgtcgcttttaagttgtaatacaaaacaccgattttataatgaaattcggctttttcaatttcattttgaatgacgctcagccttttttccgctattctgaaaaaattaagcgcttctgtatggttttgcttgtagtcttcataaatccctttgaacagataaaaataataattcagcttatcgtccgtactttttggatctttgtccttaaaactgatggcttccaatttttctgtggaagattgggagatatcttcaagaagaagccttaagcgaaaatccagcatttgataatagagaagaacgtcatgatcttcttccatcttttcaattgctttatctatgtcatctttcatttcgattgaacctgaaatgtctcgttttttcatcagtatgtaccagtcgttcagcatattggcgacttcttgagaagccacggctttggccattcttttccctccaatctttgtgaattttttgtaaattgaagttctattaatcatagcataaactgccgccgtctgtgaataacacggaaatgcatgtttgttggcgaaaaaattcattcccgaaattaaatcgtcattttccaaaaaaagtgcgcgaaaaaagcgaaaaccgcgccaagcggaatacaggagatcattgcggttccgttgaccagcccgtcagccccgcttattttcagggcttcccggtagcctattaaaaagtggatgatcgataggacataacataagagcatcatatagtaaggattcatttgtataccctcctctattcgctttactatattacattcaatagagggaaagattatgcctgtttaagtaggaaaaagaacaaaatattatagacgaaaagattttcaattacaatacatgtttttaaaaatatttccactataatcaaaatgaaagataaatttagggggtcatacaaaatgaaaaaaaggctgatgtcactattggtctgcatcctggttttagtgccggcagcaggagcttttgccgcgccgaaacaggccgagcttaaagattatcttgaagaaataggaatgacagaaaaagaattggaagcctatttgcaggatacatatgatgagagtttaaaaggttttgactcggtggaagagttgaaagactttttagggcaaagactgactaaaaagcttttggcatcctatttgaaagaatacggattgagcgaaaaagaagcggctgacctatttgttgaaaatggctatatggaaagcggccaaaacattctcgacgtgtttatgtttgaatacgaattggacgatgcgctctacaccgtgacatatgaagaagacgattttcagatcggaaacatgtttcaagaattgggtgtggatgatcaggagtgggaaagactcgtgaatcacctccgaaaagtgcgcgataacaatccgaaccttgaaaatgacttgatggctcttggagaacgtcttgaagcggtagccgatttcgagtctgtatcagagctgtcagctcaggatatcgctgaaatgctgtccattttaaacgatcttcagaagacgctcgaagtgaaaacgaaatattatcttgttaaagacggaaagaaaaaagaagtgtctttgacgacgcttgtcagtgctgaagatctgaagggagcaagcctcctagtggaagtatacgatctgcagggcaatttcattttggatgtattgctgacgcctgaaatgatcggatctgatttaattcatgacacagggtcgaaagtgaagcaaacccaaacggctgttaaacacgacgcaaagaaatctcatgtgaaaaagacggttaaaggtgcaaagcttccgaaaacggccgggcattacgcagaatggtcgatctttggcgccgttctgatgtttggcggattgtttatggtcagaaggcttcgaaaagcggcttaacattttacttcccattctaagtctgtatagaatgggaagtttttataaggagtgaaaggaaattaaggcacatcgaaaaaagatcatctggcttgcagccattgcgatggttgcgtgcggcgcttattttacaacaacgaatgtgttcaagctgatgcacggctacgctctattttcatttcagcagatgaaagaagaggaaaagcctgaaaaacctccgattcagacgacgaaaaaagaaaagacggcaattgatcaaacatttgaaaccggggagaaaatcggtgatcttgttattccgaaaatcaatgcaaggcttccgatatatcacggaacagatgaagacgagctgcaaaaaggcgtgggccatttcgcaggatccgttctgcctggagaagatgacaactcggttttatcaggccaccgggatacggttttccgaaaactcggccgagtggggaaaggcgatcagttaattgttgaagcttcctacggaacttttacatacaaagtgaaaaaggtccgaatcgtggatgcggatgaccggacggtgatagttccaaagccgagagcgacattgacggtttccacctgctatccttttgactttatcggttcagcaccggagcggtatatattggtcgcagatttgattaaaacataaaaaacagcggaatctcaggcgaatccgctgtttttttatgttatctcatgtttgttctgttttctagaagtcttggtgcggttagcagcagtatacaaaggacgattgtgcagacaatgaaagacggaagcatatacgttccattatataccaatgaataaatccataccggagtgcctttaggcgcatagtttccaaaaaagacagcgccgctgatgacatgtgcgagaaatttcagtccgcttccaagaaggacggccagcataacataggaaatgatctttcctttttgtttctcaaatgaagcatttcggatcgatccggcaaaaaagccgccgattcccgcggccgtaggcgcgataaagtaatcaagaagaagctgcagaggatgaacaacgtaaaatcctccagtgacaaattgaagcaatccggctaaaaacccggtcgccagccctgccttgagcccccatctaaaggagatcaggaagatcggaatcatcatgacggcgattgaaccgccttgaggcatttttaaaaacattccggacaccatatcaagtataagtgctattcctgtcataatcgcaatttcaatcagctgtacaagttgtttagattgattcatcataaccctcacttttgatgaacaaagggatactggacttctttcccaataaaaaaagcaatgcggggaaggagtaggacagttttccacgcactgctttggatgcaattagaaatgactttgccacattcctacgccagcattaactaacaggttcgaagggtcagaacggtcgttcactctcagcccggaggctccccttgtggtcatcaagttatttagttatattctactatactaaaaaaagaaacggacgacaagctaatttttcgaaaaacttttgctgaaaccctccaatatgtagcaatgcaaacatcttttccttataatagaacttattcatacgtacaagatgcagtaaagggttgatctgatgagtgaactcacaaaatacagcatggtgaaaaatgaaattaaatcgtggatatatgaaggcaaagtgaagccgggcgaaaaaatccattcggaaaacgaattgatgaaaatatttgatgtgagcaggcatacgatccggcaagcaattggcgaccttgttcatgaagggcttttatacagagagcaaggctcagggacgtattgctctcaccgcctgcagctttctgaaaaaggaagggaaagaaataagatgattggggtcattacgacttacctttcggattacatttttccttctattataagaggaatcgaatcttcattgtcgagtgcaggttacaccttggtcgtcgcgagcacgaataatgacattgaaaaagaaaaacaatgtcttgtaaatatgcttgacaaaaaaattgatgggttgattgtggagccgacgaaaaccggcagctttaatccgaatttaaattactatctgacccttgaacagcaccatataccatatttgatgatcaaccaattatatcaggagttaaacccgcctcatttcattttggatgatgagcacggcggttttatcgccacggagcatttgattaagctaggccatgaaaaagtgttcggtttttttaaacaggacgatatgcagggcgtcaaccggatgaaaggatttatccgggctttcagggaaaacggcttgtcgttttatccggagatggtcgtgacttacacaacagagaacaaaaaagaaaaaacgattgctgaggcaaggaagcggctttcctcagcagaccgcccgactgccatattctgctataatgatgagatagcacttatagtgttggatgtcgtaagggaattcggtttgaaagtaccggacgacatatcaattgtcggatatgacgactcacacttgagcgaggcgtctgaagtgaagctgacatcagtcacccatccgaaaatgcagatggggattgaggcggcaaaatggatgattgccaaagttgagggacggaacacggataagcttgagcattctaccgtctataaacctgaacttgttgtcagacattcgaccgccaagccgaaaaggtaggctgatcagctttacccatacaagcgattcgagtattcggctgctttcgttgccaacagcacgacagagtgaatgtcatgagacaaagatagatcctttaaaaagctccgaattcggagcttttattaaattgaaggctgatagcggagagtttaagggcatttccgcagcttcgggaacaatggtacagcgtctcgatttttttggccgctgtacatcttttatatagaagaaaacagtaagtaagaaggaataagttgcgtcaattgtcagctggtccgggatgatcgggaatttcatttgattattatttttttaaaaaagctattgtgcaaaacgaaaatagatgttatattagtatccgccctaaaaagaaggctttataaatacaacttcaaaaaaacttttaaaaaaagttgttgacattcacattgatagaatgttatattaataaagtcgcttcggacaggatgcctctgcaggctgttttttttggcgggtacgctgcaaaacgtttcagcagaaatggaaggaggtatggaaaaaacaaaggaggacgtgatatggcaaacaaaaccgcaggaaaaatagctgcagaactgctgaaggaatggaacattgatcatgtttacggcatgccgggcgacagcgtcaacgaatttatcgatgaattgcggcatgaagaaaacagcctccgcttcattcaagtgcgccatgaagaaaccgctgctctcgctgccgcagccgatgcaaagctgacaggcaaaatcggcgtctgcctttcgatagcgggcccgggcgccgttcatctgctgaacggcttgtatgatgcgaaagctgacggggcgcctgtgcttgcgattacaggacaggtgtcttcggatgaaatcgggagagattattttcaggagatcggtcttgaacgaatgtttgaggatgtggctgtctttaatcagcaggtgcattcggctgaagccctgcctgaccttttgaatcaggcgatccgtaccgcatacagccaaaaaggggccgccgttctgagcgtatccgatgatctgtttgcagaaaagattaagcggaaggcggtttatacgtctgcgctttatatcgaaggcgatcttgaaccgaagaaaagccagctgatgcagtgtgcacaattgattaaccaggcaaaaaagccggtgattttagcgggacggggaatgaaatcagcgagagacgagctggtcgagtttgcagataaagcggccgctccgatcatcgtcacactcccagcgaaaggggtcgtacctgatcggcacccgcatatgctcgggaacctcggacacatcggcacaaagcccgcatatgaagcgatggaggaaagcgatctgttgatcatgctggggacttcatttccgtaccgcgattatctgccggaagatgccccggctattcagcttgacaacaatccggcgaaaatcggcaaacggtatcctgtcaccgccggccttgtctgcgatgcgaaaaaagggctttttgaactgacgaaaacaattgaacggaaatcgaaccgcgcatttttggaaagctgtatacaacatatgaggaagtggcgttatgaagttgaaaaagacgaacaggtagcgacagagccgctgaagcctcagcaggtgattgcaagacttgaggacgcggtcgcagatgatgcggttctgtccgttgacgtcggaaatgtgacggtttggacggcgcgccattttaatatgaccaatcaggattttttgatatcaagctggcttggcacgatgggatgcggtcttccaggcgcgatttctgcaaagctttcccatccggaacgccaggttgtagccgtatgcggagacggcggtttcagcatgtctatgcacgattttccgactgctgtcaaatacgaactgcccattgttgtcgtgattttaaataatcagaacttgggaatgattcaatatgaacagcaggaaaaagggcatgttaattatgcgacggcgctcgaaaacgtcgattatgccaagtttgccgaagcctgcggcgggaagggcttcagcgtgacaaagcacgaagagcttattcctgctttgaaaagcgcctttcattcacaaaagccgtcgattatcgatgtggcaattgaagacgaaccgcctcttccgggaaaaatatcctatacacaagctgtaaactacagcaaatatatgatcaaaaaactagttgagaaaaaagagctcgacttgccgccgctgaaaaaaagtttaaaaaggattttttagtatgatgccaagggagatcgtcccttggctttataacggtcagatgttaaaattgaatgggtaatattggaatggccgcgtatgttttctttttgcatcaaaacccgtctcaacactgtgaaaagagaggggattgtaacgtgtatcgtttgccaaaaaccaccttcagcaccgctttcatattagcagccggattgctgtggatgtccatcgttcctcagcaggccttcgctcatggttttatcgaaaaaccggggagcagagcggctctgtgcagtgaggctttcggatttctcaatctgaattgtggaagcgtgatgtatgagccgcaaagcctggaagcgaaaaaagggtttccgcatagcggcccggcagatggacaaattgcatccgcaggcgggctgttcggcggaattcttgatcagcagtcggaaaatcgctggtttaaacatatcatgaccggcggagaacacacctttacctggacatataccgccccccacaatacgagccaatggcactactatatcaccaaaaaaggctgggatcctgacaaaccgcttaagcgcgcagactttgaactgattggcgccgttccgcatgacggttcccctgcatctcgcaatttatctcaccacatttatattcctgaagaccgcctcgggtatcatgtcatacttgccgtttgggatgtggctgatactgaaaacgctttctatcaagtgattgatgttgatctagtaaacaaataaagcctggacttttcttgtctgtctggaaaaccgatttgtgaatcagcgggttttggtgcaaacagagaaaataagcgatcaaaaccccggcatgttttggagagccggggtttttgagattcgttatttctttttcttcattgcggcagccataaacggcagcagggtgccgaacagcatcgtaccgccgaagaaattcccgaggtaaggctgtccgatcaagtagcagacggcaaatacagccgcagcaagaacgatcatgatgtagcctggataaaaccttttttgaaagcttgtccgctgggtaacccggaaaaatatcagcccgatgacgagcgggacaatccatagataaaacagtataaatactttcatgttcaaaactccatattttttaatctatcataccagattgcggcgtaaaatgcgtgtgacaaatcccggactcatttgctgcgggcctcatattcctctttcagaagcccgtatacgaaatggtcggcgaagtggtcgtggagccactcgcattgtctgaggcagccttctttcgtgaagccgagcctttccggaatggcctggctttttacgttttgaacagcggccctgatttcaatccggtttaaatcgtattcgctgaaaagcgtatcgatcagcgcccggcaggcatccgtcatcattccttttccttgaaaaggctccccgagccaatagccgatcgaagtcgtgcggttgatccagttaatgtaatggagtccgatgattccggcaaattggccttgatgccatattcccgcttgaaacccgttgtttgcagcggcctgtttcatgctttcttcgataaaagcttcggtatcttccagctgctttgtgccgtccacccaaaacagccatttccgcaacacatctttagactgttggatctgcatataaacggccctggcatcttttggttcgagcatttttaaatacagatcatcacgtaccattaatttaaacatccagaatccccctttttctcagtataatataaaaaagccgaccgaggccgacttttaaccagaaaatgtatcgtaaatcaggaaaatattgagggcgacgattaaggcagcgatcagccatgagacggctgttatccactttgcatttttcaggctccccataatgcgtttattgctcgtaaataagataagcgggataagggcaaaggcgatgccgaatgacaggacgacctggctcaagacaagagcggttgtcggattcacccctgaagcaataatagcgatcggcggcaaaatcgtaatgaaccgtcttaaataaagcggaatcctgaaattaatgaagccctgcatgataatatctcctgaaagcgttccgacagacgaacttgataaaccggctgttaacaggccgacgccgaacaatacggcggaaagcggactgaccatgctgctgaagtggctgaaggccacatcaaggtcttcgacgaaaatgccgttcttataaaacagtgcagcggctacgatcagcatgctcgcattgattgctccggcaatcagcatggcgatcaaaatgtcgatgaactcaaagcggaatatctttttcttttccgcttccgtttttccgaccactcttcgctgtgtgagagcggaatgaagatagatggcatgcggcatcaccgtcgctcccaagattcccgccgccagcaggatgctgtcagcaccatcgaagcgggggacaaacatgccctccaaaaccgatccgatatcaggttttgcaaaaaacgtttgaaaggcaaatgcgatcacgacgatgaaaagcattcctgttatcgccgcttcaagcggtctgacgccgcgcctttgcagttccaaaatggcgaaagatccggcggcagcaataatcgatgcttcaagcatcggtatgccgaacagcaagtagagcccgagagcagctccgataaattcggccaagtccgtcgcgatcacgacaagctctccctgaatccacaagccgatggagaccggtttggggaattcttcccgggcgacttcgggcaggtttttacccgttgcaattcccagtttggctgacaatgactgaatcagcaaagccataatatttgaaaaaaggattacccataaaagcaagtagccgtatttcgaaccagccgcgatatttgtggcgaaattgcctggatcaatataggctatagccgcgataaacgccggacccaaaaaagggagcagccttttgaagcctttgctttttccatccagtgcatcttgggcttcttttgatatttgcgagtgtttggacaaatcgtgactgaccattttattcacctatattctcagttgtttttccttgtacataaaagtttccttagtgcaaatttatatcatcatcatatgcccgcaatgatcaattgtcaaccataagatgctatagtatatgcgagaatggtttcggccaaacaaaaaaaccagcaccgctttcgggcgatgctggctggaagttatgcttgagaacccattcttccgcggaagatcaggtttaaaatgaagacgagaattgcggctccgataatcgccggaaagatggcgaatcccgcaatatcaggcccccacgtaccaaacagcccgtggccgatccaagctccgataaagccgatgaccatggagcccggtgcaccgtggcctccgattgcacctccgattaatccgatgacaatggctacgattaaagaaacgagaaatcctaacattgtctttccaccctctttcaattgatttatattaaatgtttagcccgtctcgggcgtctataaacgcttgaaagcatattgagaaagacggatggctattcctcgagaagcgaagcgcctgcgatgcccggatgcgtcatttcataaggatccagaatgagatccaattcttcctctgttaaaacatcatggagcaaacacagctcgcgcactgatcgtcctgtggcgatcgcttctttcgcaattcgtgcggcggcttcatagccaaggtgcggattgacagccgtaatggtccctacgcttttttcaacgaattccttcagcctgatctcattcgcttcaatcccggtgatgcagtaatcggtaaatacgcgaaatccgttgttcatgattttaatcgactgcagcaaattaaagacaagcacgggctccatcacgtttaactcaagctgacccgcctctgatgcaaggcagatggtattatcgttgccgatcacctgaaatgcgatctggttcatcagctcaggcatcaccggatttactttgccgggcatgatggaggagccgggctggcggggcggcagccggatctcggctagacctgccctcgggccagacgccattaaacgtaaatcgttggcgatcttggacatgttcatcatgccgactttcaaagcagccgatacttctgtgtaggcatccgtgttttgtgtggcatcgacaagatggtctgcgccggtcagctgatagccgctaatatctgagaggtgcgcgacaacgttttgaatatatctcggatcggcgttcaaacctgtgccgacggccgtggcccccatattgacttcatagagatgatgctgcgactgcctgatccgctgaatatcgcgttcgatcacccgggagtaggcttcgaattcctggccgagcctgatcgggacggcatcctgaagatgggtgcggcccattttaatgactgaatcgaattccgccgcttttttgcggaaggcatccaacatatgctccatcgtcgataagagccgttttaagtgattcaatgtggccagatgaatggctgtcggaaacacatcattcgttgattgggccatattgacatgtgtgttcggacttaaatggaagtaatcccctttttctttccctaaaagttctaaacctctgtttgcgataacttcattcgtattcatattcattgaagtgccggcgccgccttgaatgggatcgacaataaaatgctcgtgccagagcccttccgctatttcgccggcagcttttacgatgacttcgccaagctctttatataaacgtttaatatccatgttggcgagagccgccgcttttttgaccattgccaaagctttaatcagctcttcatcaatctgatagcctgtaatcggaaagttctccacggctctcatggtttgtacgccgtaataggcgtcaacgggaacttctttttcacctagaaaatccttctcgatcctggttgctttcgtatccatggcaaaacctccgtaggttgtttcttatgatgtattgtgcctcgatccgccatgttttaatttgcttttaaaaaaaggaaaatcgtcttccgacatggggctgtcaagtaataaaaagcctgttttatctaatgacatacgctcatttgcatgccaaaaaaatttaaaggaaagatatgaagaaacagacaaatggtcaaataattatgtttatttattattaacttaattaaatttctttacttcatttatctatttgtagtaaatttccttatataaaattttcgtatgagaaaggaagatctatgatgggacatgtactgatgattaatttcccgggggaagggcacatcaatccttctatcggcgtcacaaaggagctgcaaaggcgaggggaaagcatcgtatattatgcagttgaggaatacgctgaaaaaattaaaaaaaacaggcgcagaagtccgtttatacccggatttcagagaggttctatcacccgggaagaaaaaagaaaagatggactttgccgaagtggtttacaatatgtcaagtaaagtcaatgagatcgttcagttcatctaccgggaagtcaagagtgaatcttatgattatgtgatatatgaccatcacttcttagcggggaaaattattgctgaaatgcttgagctgccgagcgtttcgttatgcacgacatttgcaatggacgagcagtttgcaaaaacgtttaccccgcaaggcgaccttgaaagctcgccttattttgaaaaattgaaaggatccctcggcgaattaagtgagcggtatcctgtcagtctcgacaagccgtttgacgtattctcctgtccgggggatatcacgattgtctttacttccagagcgtttcagcctcatgccgaacgatttggaagtgactatttgtttgtagggccgtcgattgcgagcaggcaggatccgggaagcttcccgttcgccgagctggagggggaaaccgtcatcgtgatctcgatgggcacgatctttaatcagcaaaaagagctgtatcatatgtgtatcgaagcgctgaaagactttgacggcaaggtggtcatgtctgtcgggaaatcaacggatcctagggatctcggcagcataccggatcattttatcgtgaggccgtatatcccgcaattggaggttttgaaacaagctgatgtatttgtcacacacggcggtatgaacagtacaaatgaaggcctttactttgatacaccgctcatcgtcatcccgatgggggcagaccagtttttcgtcgctgatcaggtggaacgtacaggcgccgggatcaagctggacaaaaatgaactttccccggctgttttacaaaaaacgattaaagatatgcttgaaaaccgctcctataaagacgacgccgccaaaatcggccgctcgctccgcaatgccggcggctatcaaaaagcagcggatgccgtattggagttggcggggagaaagtaagacgctccaaaaacggagcgtctcgctagttcatcctgatcttccgctcaacactgccgtcttttttatggacgacgacggcggttcctttattttcggcgatttctttcgcccgttcgacggcttctgcttttgtatcctttacttcgctggcccgcttagcgtcttcggctttgactgcccagcctttttcatgtttgatgacatgctcgcacttttccgcaagctccggcctgctgctcgaaccgctgtcaccacgttttgtttcatcggctttttctgcataggatttaagctcgcttttgcttctgttatccgcccattccttcgcctgactcgtcgcaatcggaattgcccggctttcgtcgtatccttcgtcaaccatcgcattcgcaatttcaatagctttctttttcaccggtttgtccaaatgtttcaatgaagcaggatagtcttccattgaccatggcatttggccattcctcctttttcataaagttttacccgctggatgccgatcaaaaaacacggattcatcagatgaatcattgtatactataaaaaaacacaaatgagagggcgaaccttccgtgcgctacgacaaaacagatttggaaaacgaactgaaaaaaattgaaaaatgggaaaaggaacagcagaaagcatggttttgggaaaggatcggccggctgccgttcaaagttctggacaagcttacgccggcattcattcaagataaaatcggcctgctgctagacgaaatcggcggctttattcaaaatggaggccaatatttgacgtccgaaaagcatctgatccgccagtttcaaaaaaagctgccggatgaaacgatcgaaacgattgaagatattcaatgggctcctttggaagtgatggatcaaatatgtgaaaatctcgggaaaaacagggcgaataccgcagcagtccaaggagcgacaaccggtgtgggcggcttgttcacgcttgccgtcgatattcccgcaatcctcggcctttctttaaagacattgcaggacatcgcggtatcttacggctacgatcctaaagaaaaaacggagcggatgtttattattaaatgtctgcagctcagcgctgctgatattgtcgggaaaagggcgatcattcaggaactcagccgataccatcaaccatcaggctcccgtgaaaatatgatttcgcaaattcaaggctggcgggaagttgtttatacataccgcgattctttcggatggaaaaagctgtttcaaatggtgccagtagcaggaatcctttttggtgcaatctcaaatcgttcgatggtgaacggtgttgccgaaacagggatgatgatgtataaaaagcggcgcatcatggaaaggcttgcggagctggacgcgacagaaacagagggataaaaaggctgccgtttgataacggcagcctttcttatagagttacgctttttctgtaaagcgaggcagtctgaagataatcgcgcaaatgccgcagacgccgattaaaatcggataaaaagaataaggaaggatgctgacaggcgatattttcgcgatttgtgcagctgacagcatttgtgcaccgtaaggaatcaatccttgaaccgcacaggaaaaaatatcaaggatgctcgccgatttcctgttgtcgattccgtacctgtcagataaatcttttgccagcgaccccgctgtaatgatggcaatcgtattgttggccgtcgccaggtttgccgcgctgacaaggccggcaatgcccgcttcagctcctttttttgaacggattctccgcgatacaaattgaaggagaaacgcgatcccgccgtttcgcttcatcatttccgccattccgccaatcagaagcgataaaatgatcagttcagacatcccgccgatgccttcggttatcgccgtcaaatacgtatgaagcgtcaggcttccgtcggaaattccgattaccccggctaatacgatgccgccgaaaataacggccataacattaaatccgagaagggcaaatatcagaaccccgagatacggcagcaccttcacccagctgtaagtcccggcttgtgctccgggatgccctccggctgagaacaccatcagcagaatgaccgtggcaaccgcggcaggcagaacgatcaggaaattcgttttaaacttgtccgacattttcgtcttttgagtgcggacagcggcaatggtcgtatcggaaataaatgataagttatcgccgaacatcgcgccccccacaaccgcagcaaccgaatatgccgccggaacgccgatttcagcgctaatccccgctgcgatcggagcgagcgcagcaatcgttccggttgacgtgcccatcgacacagagataaacgcagcgatgataaataaaccggcaaccataaactgccccggtacaaatgaaagcgcgagattaacggttgattcgacggcccccatcgcctttgcggctgatgaaaacgctccggccaaaataaagatcatcaccatgatcattatgtcggggtgcccggcgcccttcgcaaaccactccgtcttttggctgagcttctccttcctgttcatcgccagtgagacaaccgatgccgcaagcgccgcggccacgattggcaggctgtaaaagtcgcctgtgatcaagcctgatccaacgaataaacaaacaaataaaaacagcggcaaaagccctgaggcttttccgttttgattttgcatgatgtacacctcttctgtaggttcaaaccgttttttcaccaatatccaacactttaaaaggcgcacgcgcaaaagtcaaatggtaaaataagttctggagaaaatcaaatcaaaagcgggggaagccgatggatcgcaaaacgaatcttcttgaattgacaaaggaagtcgcagaaaagcacgccaattttcttgtttcggaagtgaacgaccattgtatgcgaattgccgttttggagggcgaatacgtatggcatatccatcccggctcagatgaaccgtttattgttttggaaggggagctgttgatcgattttcaggatcgccccacagaagttctgaaagcgaatgattccctgctgattccgaaaggcgtcattcaccggacacgcgctggtgtcaggtcggttaacctttgtatagaaaaaactaatgcggaaaccgtcccgttcgcggaagggaatgtgctgaagctgatacggtgcaaatcagccgaacaaaagcttcaagcattcagcgaggcgcaggccaaatgggctccgctgcaaaacgtcagcggattcatcaggcagtggggcggatggatggaaacagaagacgggccggaagccgtcgtcctggtgctttggaaatcgaagcacgattatttgaactttatggcggaacatcatgatgagatatatgaaagaacgcatcagaaaggcacattcgaatccatcaacattacgctgtttgaagatcctgccgagatatctgaaacgctgcagaacaatacgccggctccggtaccggaatggacggtaatgggcagcggacgattgcgcgatccacactctctttcgtgaatgtgctatttgtgtttactctttttgaaatgtggaatgtaaaaaccataacacttcaaaaggaggaatcaaaaatggcaaacaataatgacgacaacaaaatgagcagggaagaagcaggcagaaaaggcggagaaaaaacaagccaaaaccatgataaagaattctaccaagagatcggtcaaaaaggcggagaagctacaagccaaaaccatgacaaagaattctaccaggaaatcggcgaaaaaggcggggaagccacaagccgcaaccatgacaaagagttctaccaggaaatcggcgaaaaaggcggggaagccacaagccgcaaccatgacaaagagttctaccaggaaatcggcgaaaaaggcggagaagccacaagccgcaaccatgataaagaattctaccaagaaatcggtgaaaagggcggagaagccacaagccgcaaccatgacaaggagttctatcaagaaaacggcgaaaaaggcggacgccaaagaagaagcggttaatgtgcggtgaagagaggggctgacaaacagcccctctctttttatgaagatgcctgccgctgccgcttgaacgcccatattaaattattataaattattgatcttctgaagagatttccggtctgttttgttatataatttacagatgatgcatcaaattgtagttataaaagtttgaatgctaaaagttaaggactaaagtactggtgggagtgtaccgaatggcagcgttgattaaattttttcagcatcctggggtcaggcgtttttcagtttttgttgtattggcgggggttttatatctgttccgcagcatgatgaatctcatattgctcacatttatctttacgtttttgatgaaccgtctggaaaatgtgatccgcggttttttaaaccgctttattaaagtcagccagagactgattatttcttgtttgtatgcggctcttgccatcgcgctttcgatcggcggtgtggtctattaccccgtaatcgtcacccagattcagcagctgatcaaacaaggaaagcatatcgcttctcaccctgacagcattccttttctcgatatgatcaccggtatgttcggcgatatcaatttgacatcctatttggaaaagggtcttaactttatctatacatatatcacggatatcagcacgtttggcctgcaggtggttatgtcattggttctcagcatgttcttattgatcgaaaaagacaaagtcatgagcttaatggataaatttaagacgagcaaaatagctattttctacgaggaaattgcttactttgggaaaaaattcacgagaacgttcggcaaggtgcttgaggctcagtttattatcgccaccatcaattgcgcactgacgaccattgccctcgccattatgggttttcctcagcttttcggccttgccgtcatggtgtttttcctcgggctggttccggtcgcaggcgttgtgctctcccttattccgttaagcattatcgcctacagcatcggcggaatcgcttatatcgtatcactggtattggtcatcatgatcgtccatgcgatagaggcctatttcctcaatccgaaattgatgtccgcaaagacggagctgccgattttcttcacgtttatcgtgctgattttttctgaacattttattgggatttggggtttaattatcggtattccaatatttgttttcctgcttgatatacttgatgttacaaatcaggagaaaaaccgaacagcaggcacacgaaaatagcatatatttgtaaatcgaaaaattcggtttacatatttcgaattttcaggtataactgttatataacgaaatagcgccacacgtttaatcctttagtaggagtgggggacccgatcatttggggtgaatttttctgttcccgtgcgaaccgaaagacggacatctcttcgtccgaacccgtcagctaacctcatcaacgtgaagagagtcatgtggaaccaattttaatggtaaaagcccgtgggagatctctcatgggctttttttagaaaggggagatatgttatatgaagttagcaacaaaaattattatcgctctattgctcggtgcagtcgtcggtattatactgaacgtcacttcaccggatttattcagcaagcttaatacatttttattcgggccgctcggcacgatcttccttaacttaatcaagatgctcgttgtaccgattgttttcttttctctgactttaggggtagcaggacttggagatccaaagaaattgggcagaatcggtgccaaaacgatttctttctttttaataactactgcaattgccattattatcggacttgttttagcgttggtcatcaaacctggaacgatcggaacatatgatacaagcgctgcggaatattcagcccagaaagcgccaagcatttctgacacgcttttgaatatcattccgacaaacccggttcaggcaatggctgaaggaaatatgctgcaaatcattgctttctccattttggtcggtctcggaattacgatgctgggcaaaaaagcggacgctcttctcaaagtggttgaacagggtaacgatctgatgatgtacctggtcaatcttgtcatgaagttcgcgccgtacggtacgttcggcttgattgccggggcaatcggaagccagggctgggacgccattaaagcaatggggctttatatgatcgtcgttattctggcgctgttcattcataccatcgtcacatacggcgcagcgattgcgcttctggcaaagcggaacccgctcacattctttaaagatttttcagaggttatgcttgttgccttcagtacgtccagcagcaacgcgacgcttccggtttcgatggatgtcgctcaaagaaagctgaaagttccagagccaatctcaagctttgtccagccgctcggagctacgatcaacatggacggaacggcgatcatgcaaggggtggcaacagtctttatcgctcaggtgtacggcaatgacctgtcgctcacacagctgttgatggttgttctcacggcagtgcttgccagcatcggaacagcgggtgttccgggtgtcggactcattatgctcgccatggttcttcaaacagttggccttccagttgagggaattgcgctaatattgggaattgaccgacttctggacatgattcgtacggctgtcaatacaacaggcgatgcagcatgtgcggtcatcgtcaccgagacggaaaagaaacacggcaaaatcgaagcccctcatagtgaagtgtccgtgtaacttaagaaatgatataatcaaacagtgccttttcggcactgtttatttttttggaaagaggagggggctatgacaaagcagcctgttttacatatagaaaatgttgataaaatcatagacggcaaaacgatattgaaagatatccgcttaacggcggatgaaggggagatcatcggtctgcttggtccgaacggatcaggaaaaacgaccctcatcaaattgatcaccggtttaatcaaaatgaagagcggatcaattgtcataaacggctttccgattgaccgccaatttgaaaaagcgatccagtccgtcggagccattgtagaaaatcctgaattctatccgtatctgacaggctatgaaaatctgaagcactatgcaaatatgcacgctggaatcggacgggaaagactggaggaagtcatcagcagagtcggccttgaagatgccgcagaagacaaggtcaaaacatactcgcttggaatgaaacagcgcctcggtattgcccaggcgattcttcaccggccaaaactgctgattttggacgagccgacgaacggattggacccggcgggaatgaaagatttccgcgaacacttgcgtgaactcgccgaagaagaaggaacggcgatcctgtttgcgactcacttgctgaaggaagtggaagatttatgcgaccgggtcgtcatccttcaaaaagggaaaatcaaatcaactgtcgtccttaatcaagcggacgagaaacaggaaaaggcgatgctggaggtacagcctcatgacaaagcgcttcagtggctgaaagaccaaggatacgaagctcgcaccgaaaaaggcctgcttgccgtaaaggtggagaaagcgcaaattccggctttaaatcaacagcttgtcgccaatgatattgacgtctattcgatcgctccgtttaagcagtctcttgaggatgaatatatggcgcggacgaatggaatagaagagaggaatgctgatgtttaaactgattcaaaacgagcatgttaaattgctgaagcgcaaagtaacatttgtatcgctggcgctgattgtagtctttcaatttctcctcgcgctcatcaccaaaagaatcctgatgggcgccggggcagaggatcattttatcggctatttttcattcaccccaaacctgaatatcctcttgcaggggctttcgattgtggtggcggcttcaattatatcctttgaatatgataaaaagacgatcaagtttttgctgatccgccctgtcagaagagaaaagattctcgtttctaaatacgtgacgagcgtgctcgcaagcatttggctttttattatttactacggattttctatattgttcggcctgctctttttcggcgtgaagctcgacgaaaaagcggagccgctctttatcaatacggtgaaaatgatcgggacgcagtggtttgaagtatggatgatggtttcatttgcgtttttatgctcggcattattcaaaagcagcgcgctcagcatcatggtgtcgattgtcgtgctgtacggcgccaaaatgcttgtgacgattatggcgtatttggaaaagccgctcggcaagtttttattgttcgccaataccgatttaacgcagtacgccggagaggcaaagccgctttttgccgggatgacgcctttattctcgctcttcatcgtctttatccatctcgtgttttttctcggaacggcatggtggggcttttgcaaacgcgatatgaaggtataaataattgtccaaagtgtgacaaaaggaatgacatttttgtgaaatatgtcgtaattaccgtgtgaatctcctattctcaattataattttaggaagggaatgggggatgagacatctatgaaaaagtttattacggcgttgccgattgtattgctgctgtcattttcatttgtttcttttgcctttaactttgatcatctcgtatattttagacttgcgctcggactattttcgcttgcaggtttgtttctgttatataaattgaaaaacggcgtccgcctctttatggcatacctttatggaagctggatcgtgctggccggaatcgccgcatatgaagaaccgcttttttccgatttcttcttcggcggcctcacgatcacgatgggctacttaacctacatgctgatttatctcggtatgaaggttgaccgccgcggcggtcaagccgtttagtcaaaagcgcacctcgctgaaggtgggcttttttgttttgccaaggctatcatttgcacaacgagccgagaacgaactataatacttattaaatctatcggaatttggtcaggaggatgccggcgtgtcttcaatatttgtgaaaacggaaaggcagcaggaatggctcgataaaatcggaaaattggcggatgaatttgagaaaacagcagcgtactatgacgaacatgcacaatttcccgcagaacatattcaaaagctgcgggattcaggctacacagcgctgacggtcggaaaagattacggaggagaaggcatttcgctctacgatatgcttttgtttcaggaacggcttgccaaaggagacggaccgacggctctcagcatcggctggcacttaagcgtgatgggggaactggcggagggaaacagctgggaccgggatgtgttttcatcgctttcccatgaagcattaaagggcgcgctgatcaacagagctgcaagtgaagcacagacaggcagcccgacaagaggaggacgccccggaacccatgcagtcaaaaagaacggcggctggattgtaaacggccgtaaaacattcacaacgatgtctccggttctcgactattttcttgtcaccgcttggattgaagagaagcaaatgatcggcgttttcttgatccataaagatgcggaaggcttggcaatagaagaaacgtgggatatggcggcgatgaggggcacgggaagccacgatttggtgctgaccgatgtccgtctggacgaatccatgcttgttgaactgttggctggtaaaagaaccgataaaatcaacggctggctgcttcatataccggctgtctatttagggatcgcacaagcagcgagagactatgctgtccaatttgcaaaagactatcagccgaacagcttgaaaggtccgatcaaagaggtgcccgctgttcagcgccatatcggcgaaatcgatctggaactcatgaaagcccgccactttatgtatcatgttgcagagctttatgatgatccggagcgccgcgcccttttgacaggtgagcttggagtggttaagcacacggtaacgaatacggccattgctgtcgtagacaaggcgatgagagtcgtcggagcgaaaagtctcgcaagaacgaacccgctccaaagattctaccgcgatgtccgggcgggcctccacaacccgccgatggatgatgcgacaatcgccaagcttgcaggaattgcattcagcgaatagttttgtcattctttaagctttagcggggtgtcgatccgctaaaagaagccgttcaaaatcagcggcttcttttttatgtttgttttgcttttgaaatggccaaaaggcggttctcgtgtctgcggtcgatcttgtcataaatgacttccatttctttcgggttcttggcgatttcttttttatattcttcgacaagctgatgaaaggttttaatcttccgttttgacatgtttatccgcctttcttgatggattggtattcgctttcaagttcgcttaaagacaattcgtagaggtggcgctcttcttttttatatatgccaagctggataagacgctgaatgagttgtttctttctcatttccaccgctttctttaattgaggggccatgtgatcacctcgtcaaccattagtgatattgataatcattatcaattaattgcattatactaaacctgatcaccgaatgtaaagcgacatcttcgaaagaatattgaataaaatcgaaaaatatgaattattatccaaaagaatatataaaaaaagaagccgacaagggcttcacaactagaaaaaataattgcaaaataggaacaaaaaacattctaccggaatataaaaaacgaatcaagaactttttatgaaatttcgacattttaagtttcccgggaaatactcgtgtcgaattttttaaagctcattcttttatgaaacaaattttgctgctgtcccgtcttgtataaaaaggacatgggggtgctcccatgtccggcggttcagacaaaaaatcaggactttaaacgaattagctaatatgttcagccaggaattcattcacttcttcaggcgttttggcatttgcgctgtgaaggtgtcccgttttttcgccgtttttgaaaatcaacaggcttggaatgcccatgacctggtacttgtcggcaagttcaggaaggtcgtctttattcagctcataccagtcattttcctgataagcctcaagaatgtctccgatgaacatgttcatgcgtgtgcagtccgggcaccagtcagcgtaaaatttgacgatgatttctttatcggattggatcaattcattaaattgcgcttctgttgtgatttttttcaattgcaacctctccttttcaatgccattttaatataaaatgaaaaggatttacatacaaatgctttttatatgctgtttttagaccgtattaaaataattagatcattttcccgggaaagtgataagatagtaaagatgaatccagtggggggagtacgaattgaagacaagattaggattggtatacggcggaaaatcagcggagcataacgtttctctgcaaaccgcgctggccgtcacgaaagcattagatactgaaaaatttgatatacacccgatttatataacagaaaaaggcgagtgggtgagagggccgcaactgacagaaccggtttcaaatgtgaaaatgctgcaatttgaacagacgggccagacattttctccggctgtgttgaaccgcgatatgtttcctggcgaagctgatgcaaaagaagactctatcgatgttgttttcccgcttttgcacggaccgaatggggaagacggcaccattcaagggatgcttgaactattgaatgtgccatatgtgggcaacggagtcttggcttcctctgcgggcatggataaagtggtcatgaagcatctgtttgcacaggcaggtcttgaccaggcgaaatacgtttcatttttgaaaaaaacttggagtcagtctaaagaagaatgctatgctcaagtggaaggggaacttggctatccgtgctttgtaaaaccggccaaccttggatcaagcgtcgggatcagcaaatgcagaagccgtgaagagcttgaccaagcctttgagcttgcattccaatatgaccggaaaattgtcgttgaagagggcgtcatcggacgggaaatagaactcggcgttttagggaatgatgaacctgtctgctcagtcgcgggggaaatcgctccgaagaaagacttttatgactataaagcaaaatatgaagacggcgatactgatttgattattccggcttccctgacagaagacgaatacgaaacaatgcgcagcatggcggtcaaagcgtttcaggcgattgacggttcaggccttgtgagagcggactttttccttacaaatgaaggcagggtcctgatcaatgaagtcaatacgatgccgggattcaccccgttcagcatgtttccgcttctctggaagcaatcaggggttgagtacgctgaactgattgaaaagcttgtcgctttggcaatcgagcgccacgaagaaaaacagcagattaaacatacattttaacgggacggagcggaccgaatccgggagctttcatggagaaaggcgctgaaggcggttcgcccttagatacagctgcagacactatccttatttgtggtagtgtctcttttccttgcagaagaaagagagggacatacatgataacaagaacggtaaaagaaattgctgaaatgtcggaaggcgttttgacgaatgaagcttttgaagggcgtctcatcaaaggcgtctcaaccgattcgagaaaactggcgaaaggccaactgtttattccgcttgcaggcgagcggttcaacggacacgtttttgcagagcaggcttttcaggaaggcgttgcggccgtgctgtggaaccgaagtgaaccgaatcctccggaagggaagccggtcattttagttgacgatacgctggaagcgctgcagaagcttgcgaaggcatacaggaatcagctggacgtaaaagtcgtcggcgtgaccggttcaaacggaaaaacgacgacaaaagacatgattcatgctgttttgggcactgagtataaagtgcataagacagaaggaaactacaataaccatatcggcctgcccctgacgattctggcgatgcccgaagacacagaagtcgccattttggaaatggggatgagcgccaaaggagaaatcgattttctcactcgtctggcgcggcctgatattgcagtcattacaaacattggtgaatcacacctccttgaactcggatcaagagaaggaattgcagaggcgaagctcgaaattgtcaatgggctttcaaaagaaggcacactcatttatgtcggagatgaaccgctgctcaccgaaaggctgaaccagccgccttacgatacaaagacgtttggagaggatccggctttcgattatcagcttgaggatatgacacagactgaagaggggacggcattccgcgtgagaggaatcgaaaacgggttcttcatcccggtccttggaaagcataatgtgaaaaacgcattagccgcgattgcggccggagacctcttgaatgtcagccgcgctcacattgcagaagggctgactaaactgaaagtgaccggaatgcggcttgagctagtaaagacgccggacggcgttgcgatcattaatgacgcctataatgccagcccgacatcgatgaaagcggcgatcgagcttgtcgaacagatgaagggatacggcaagaagattcttgttctcggcgatatgctggagctcggagaaggagaaaaagcgtttcatgaagaaatcgggcaggcggtcaacccggactcgatcgactttttatttacgtatggagaactcggtgcatatattgcaaaaggggcgcttaaacatttcccggaacaccgcgtccttcatttcaacccggaagaaaaagacagtttgaaaaagacactgaaagaaaaagcgaatacaggggatttaatcctcgtcaaagcgtccagaggcatgcgccttgaggatgttataaaagatttgtaagggaactttgaatcataaagtcgttttttatgtgatgatcagtaaaagaaaacgggtgaatggtcatgataggatgtttatgcattcacggatttaccggagcgccgtatgaattggaaccgctggcttctcatttaaaacaaacggcagattggcaagttgaaatgatcacgctccccgggcacggtgagatgccggttttaaaaggcgtctgttttcaggaatggatcgcttgtgctgaagtggagctcatccgcttgttgaaaacgtgtgatacggtatttttaatcggattttcaatgggcgggatgattgccggctatttagccggaaaatatccggtcagccgccttgtcctgttgagtgcggccgcccagtacatcagcccgggacagctgatccaggatttgaagaatgtgatcaaagattcactgcaaggcaagctagaggataatctgctttacaaaaggtacaaacaaaagctgacaagcactccggtgtcttctgcatttcagtttcgcaagctcgtcaagatgacaaagcctgcattgaaaaacctccggatccctgtgctcattgttcagggggagtgtgatgccatcgtgccggtgtcaagcgcgtattacttgtatgaaaccattccttccgaagaaaaagagctgtgcctcttgccggaatccaagcaccatgtctgccttgaagaaaactcctctatcctatttcaaaccgttgaggcgttcctcaaaaaaacgccgattgaatctataaaaaaataaataattgaacggaaatctgcaaaaaataatccgggatgctgacagggaaaaaatgaacgtatgctgtcgaaagcagcacatgcctgtgttacaatgtgtaaaggacgccttcgggcgggctttagttgcgcggacggacggcttcgcccgaggttcataggagactgccgaaccggcgagagagcacaccgctcattctcatcttgttgaaaaacgtataatggaatggtaatataacatgtaaagtaattcgggctttgcataagtatgaacctgtcctttgcacaaagggcagtttttattgataaaacacgattactgaaacagtaagcagaaggagtttgaatacattgacaataacgtttcaagattttcaattaagttctgatctcacaaaagcaatcaagcgtatgggatttgaagaggcaacaccgattcaggcacaaacgattccactcggccttgcaaataaagatgtgatcggacaagcgcaaacgggaacaggaaaaacggctgcatttggcatcccccttgttgagaaaatcaaccccgagtctcctaacattcaagccattgttatcgcacctactcgtgaactagccattcaagtttctgaagagctatataaaattggacaggataaacgcgctcgcgtgctgccgatttacggaggacaggatatcggacgccagattcgcgcgcttaagaaaaaccctcatattatcgtcggcacacctggtcgtctgcttgaccatatcaaccgccgcacaatgcgtcttcaaacagtgaacaccgttgtgcttgatgaagcggatgaaatgctgaacatgggattcatcgaagatatcgaatccatcctttccaatgtgcctgctgaacaccagacattgctgttttctgcaacaatgcctgctccgattaagcggattgcagaacgtttcatgaccaacccggagcacgtaaaagtgaaagcaaaagaaatgacagtatcaaacatccagcagttctacctagaagttcatgaacgcaaaaagtttgatacgctgacacgccttcttgacatccagtctccggaattggcgatcgtattcggccggacaaagcgccgtgtcgatgaactgacagaagcgcttaatctgcgcgggtatacagctgaaggaattcacggagatttgacccaggcgaagcggatggttgcactccggaaatttaagcaaggcgcgattgaagtgctcgttgcgacagacgttgcggctcgcggccttgatatttcaggtgtaacgcacgtctacaacttcgatgtgccgcaagatcctgagagctatgttcaccgcatcggaagaacgggacgcgcgggcaaaacaggaatggcgatgaccttcattacaccgcgtgaaaaggatatgctgcgcgccatcgagcagacgacaaaacgcaaaatggaccgcatgaaagcaccgactctcgatgaggccattgaaggacagcagcaggtgacggttgaccgcatccggacgatcatcgaggaaaataacctgaacttctatatgacggctgcagcggaattattggaagaccatgattctgtgacagttgttgcggctgccattaaaatgatgactaaagagccggacaacacacctgtccgtttgacggaagaggctccgctcagaacgaagcgaaacaaaaatcaccaccaccgttcatcaaaacgcagagacggcggcggctacagaggaaagaacaatcgttcatcttatgataaaaagcgttcttcgaatgacagacgccaaaaaaaatcatataattcataatcaaaaggcggatccttttttacggattcgcctttttttaaaaactaaagcctttaaacgaaacattttcagaccgaagaccgtaaatagaatgagattgggggaatcgagttttgagaagcgagccgaaaaatcaaatcagccgtgatggcgttaaagtctggagaatcacggcttgtatcacatcattcgttttaatgctggctgcagcaggcctgattgccgccggggagatatttaagtggccggtatggatcggcattttgtcagcggccgtttggctggggatttcatttgtcatcattatcatgattccgaatatccgccacagagtctggcgctacgaagtccatgagaacgaaattgatattcagcacggcatctttgtggtgacccgcgtgatcgttccgatggtcagagtccagcatgttgatacatcgcagggccccatcctcagaaaatataatctcgcctccgtgcaaatttcaacagcagcgacgacccattccattcccgctttggatgttgaagaggccgatcagctcagagattccatttccaggctggcaagggtgactgaagatgatgtctgaaccgagacgcatgcaccctgccgccgtcattctcaactttatcaaaggccttgttgagacggttaaaaattttatcattccatttggcgtggtgatttttttaaatcaatcgcaaacagtcaaaatgatagcgatcgccgcggccgtgctgtttttcattgctttggttgtgacgagcatcatcaagtggagcaaatttacataccgtatcgaagaggatgaattgcgaatagaggaaggcttgatcaataagaaaaaaaggtatattccgatcgaacggattcaaacgatcaacacaagcgcaggcctcattcaacaaatgttcaagctggtgaagcttcaagtcgaaacggcaagcggaggaacggaagcggaagtttccctggtcgccattacccaggcagaagccgaacgtattcagcaagcgcttttcgaaaggaaaaaagcggcggaagacacggggaccgatgtcccggttccgctggaagaaactgctgaagaggcggaggaagcggaagagccggtaatgatgtacaaaatgaccggccaggagctcttaaccgccgcttcaacctcaagcggcatcggcgttattatttcaggggtattcgcttttttcactcaagtcgatgatttctttgatttggattggctgtatgaccgctttgcttttttgaacagcgcaggtgccgccgtcatcgcattggccgcctttgttgcccttttcatcgcatggctgctcagcatcgtcgggatgcttttgaaatatgcgaattttactgtcgtgcgtaaagagaaagaaatcgtcatttccagagggctgattgaaaagcaacaaatcacgattccgctccagcggattcaagcgattaaaatcaaggagagcctgatcaggcagccttttggacttgcagccgtcacgatcgtcagcgcaggcggaaacgtcctggaagaagataaatcagccatcttatttccaatcatcagcaaaaaaataatcaatcagcgtctcggcgaattcattccggattatgcgccggaagacgatttgaaccgcttgccgaaacgcgcgctgcgccgctatatcctgcgcgcatcctggccggttctcgccgtcgttccgctttccattctgtttccgccatggggctatttgtccgctgtattgattcctttttactggatcatcggctatttctcataccgcgatgccggatggaagatcagcggcagcaaaatcatcatgtcatcgcgcttcatcggcagaacaaccgctgtcattcaacgcaggcgcatgcaggttttcgaagtcagccgctcgtatttccagcgcagaaaacagcttgtttcgattcatacatcaacaaaatcgtctgttttaatggagaagttttcggtggctgatgttgaggagaaagattcggacgatatcattgcatggtattcatatgaaaaaagagtgaacggttaaaagccgttcactcttttgtttaacaatggcggagccaaggcgagtccgcccagcagaccgaagatgtgcgccatcatattgatattttggtttacaaacgtcatcaaaaccgaaatggcgaggatggtgacgatgatttgggaattggcgctccccatcagctcttttctaaacagcacgatgtacaggtacacgccgaacaagccgaaaatggctcccgaagcgccgacatgcatatactccagcggttcgatgaaatatgtgccgatattgccaatcactcctgctccgatataaacgatgagaaacttgagtttcccgagcattcgttccagcccgggggcaaacaaaaagatcgacatcgaattaaagagcaggtggccgaaaccggcgtgaataaagattggcgtcacaaacctccaccattctccgttcgctattccccagttaaagccaatcaataaatcagaccacatctgtacggccgtaaacggaaataaaaaaagaatccaaatggcaagctgcagggccaatatggcggatgtgaccgggtagagcctgataaacgtctgaaaattttctgttctgataaacatgcttatgatttaagcccctttacaatgatctcgtacatatatagtaacacgtttatgaacaggcagcggcgattagtacggacgagaaaatgattttggaaggttgtcatgctagtctgcatattgtctgagacacgctcatatattgggtagtgcaataagggagacgagtcgttgcaggcttttatggtacgcacgccgatacagccggccctgttcttatggcgtaccgttaaagtcgaacaagcggtttcttcctttttacatcaatgattaaaaaggggttgaaaaaaggtgagaaaaagctttgttttgcttttaacggggctgcttgtaatccttatgctttctgcctgcggccaaaaatcgcaagaagatgttgtgacggggctcgacaagaaggcaaaagaatacacgtcctataaggcaaaagcgaaaatgaccattgaaacgggaaatgaaccgcaggagtacaacgtggaaatctggcataaaaaaccttctctttaccgggtctatttggaaaacccgaaaaaagaccagagccaggtgatcttgcgcaatgaaaacggcgtgtttgttttgactccgtcgctgaataaaagcttccgctttcacagcgactggcccaataacagcagccaggtatacttattcgaatcgctcgtaaaggatgtcaaaaatgatggggaagcttctttttccgcaaaggattcaaaatacatttttgaaacgaaaacgaattatcagcataatcagatgctgccgactcaggaaatcgttttccataaaaagaccatggctccttcatcggttaaagtgatggataccgaccgcaaaccgatggtaaaggttgagtttacaagctttgaattcgataagccgctcgataaagactcttttgatgaaaagaaaaatatgacgctgtctcaaattgacgtagcgacaagcgctgacgtgtcagactctttcgctgtcaaaacgccgctcgatgtgcctcagggcgtgaaaaagcttgaagagaaagagatggcgactgaagacggcaaacggatcgtcatcacatatggcggtgaaaaatcctttacattgattcaggaaaaagcccgcgtcgccaaaacatccacttccgtatccatgaacggagagcccgttgacctcggcttcacggtcggcgcactgacggataaatcgttgtcatggacatatgacggagtcgattactttatctcatcagaagatctttctcaagatgaacttctgatggttgcaaaaagcatgcagggacagtcttcgaaatagactgtgccgtatccggcagcctgttttccgcccggaagcggaaagcaggcttttttatatttgcgtcgcaagcgtatgatttcgacagattttccgtaaaatgtataccgtgccagcaatttttcttttgttcagggctgatgatcccgtgcaaaatttccctttctccgaactttttagtatgatgggaaggacgagtgaaacaaggaacaggaagtgtcatgatgagcttaaaaccattctatagaaagacatgggccgaaatcgatttaacggctttaaaagaaaacgtccgcaatatgaagcggcacatcggcgagcatgtccgcctgatggccgtcgttaaagcgaatgcctacggacacggggatgcacaggtagcgaaggcggctcttgcagaaggggcgtccattcttgctgtggctttattggatgaagcgctttcgctgagggcgcaggggattgaagaaccgattcttgtcctcggtgcagtgccgaccgaatatgcaagcattgccgcggaaaagcgcattatcgtgactggctactccgtcggctggctgaaagacgtgctcggttttctgaatgaggccgaagctcctcttgaatatcatttgaagatcgacacgggcatgggccgccttggctgcaaaacggaagaagagatcaaagaaatgatggagatgaccgaatcgagcgataagctcaattgtacgggcgtgttcactcatttcgccacggcggacgaaaaggacaccgattatttcaacatgcagcttgaccgctttaaagagctgatcagccccctcccgcttgaccgtttgatggtgcattcgtcaaacagcgccgcgggtctgcgcttcagggaacagctatttaatgccgtccgcttcggcatcggcatgtacggtttggcgccgtcaaccgaaataaaagacgagctgccgtttcgtctgcgggaagtgttttcgcttcataccgaactcacccatgtgaaaaaaattaaaaaaggcgagagcgtcagctacggggcgacatatacagctcagcgcgacgaatggatcgggacagtccccgtcgggtatgccgacggatggctgaggcgcctggccggaacggaagtgctgatcgacggaaaacgccaaaaaatagcagggagaatctgcatggaccagttcatgatttcccttgccgaagaataccctgtcggcacaaaggttaccttgatcggaaagcaaaaagacgaatggatctcagtcgacgaaatcgcccaaaatttgcagacgatcaattatgaaattacctgtatgataagttcaagggtgccccgtatgtttttggaaaatgggagtataatggaaataaggaatccgatcttgcctgatcaatcctgaaaattgatgaattagcggaaaaacaactttgcttgcgaaaagaataatgatatgattatgaatggaatggatagagtgttgtatccgtaagtttggtggaggtgtatgtttttgtctgaatccagcgcaacaactgaaatattgattcgcttgccagaagctttagtatcagaactggatggtgtcgtcatgcaagataacgggagcagaaatgaactgatttaccaagccacaaaaatgtatttacgcgaacgcaaaaatcgacaaattcgggaatcgatgagacgcggttatatggagatggccaagatcaatttgaacatctcttctgaggctcaatttgcagagtatgaggctgaaaacacagtagagcgcttagtaagcggaggataatcatttgattgttaaacgcggcgatgtttattttgctgacctatctcctgttgttggctcagaacaaggcggggtgcgcccggttttagtgattcaaaacaacatcggcaatcgcttcagcccaactgctattgttgcagccataacagcccaaatacagaaagcaaaattacctacccacgtcgaaattgatgcgaaacgctacggttttgaaagagactccgttatattgctcgaacaaattcggacgattgacaagcaaagattaacggacaaaatcacccatctcgatgatgaaatgatggaaaaggtcaacgaagccttacaaatcagtttggcactcattgatttttaatattgatgaaagttgctcgaggcgaaagagcaactttttttgtgttcaaaaataacaaacgatataatggaactgttagtccaaaaaatgttatcagatgtagtcagggggatgaacatgtcgaatcaagcggtgttaaaatttatctcggaacaccaaaatgtactcgccgggaatttggcggatattctgaaagacttaaacagcaacatgacaaacgtgaagctgactgaacacatgtatgagacgatcagcaatgaatatattcatatcctcatgaatgagtccggggacgggaatgaaaaatcgatcgacaccatctaccagttctcttcaaaagccgtacagctcggcgttccgctgaagctgctgtcgtcgggattatcagctttttggaagcacctttactatgaaatgaacaaggatgtgccggaagatcagcagtgctatgatttgatttgggaaatcgataaatttatcgaaccgatcaacagcgaaatcttgaatcagtatgcgatctcctgggagaaaaccgttgctctgcaaaaggtcgcattacaggagctctcggcgccgctgatcccggtttttgaaaatattacggtgatgccgcttgtcggcacgatcgatacggagcgggccaaaaagattatggaaaacctgttgagcggcgtcgtcaaacaccggtctgaagtcgtgctcattgacattacgggcgtgcctgtcgtcgatacgatggtcgcacaccacatcatgcaggcttccgaagccgtcagacttgtcggagctaaatgcctgctcgtcggaatccgcccggaaatcgcgcagacgattgtgaatttgggaatcgatttaactcaggttattacaaaaaataccctgcaaaaaggaattcaaaccgcattagaaatgacagacagaaaaattgtttcattggaggaataatctttgagggtacctaacattccaattttgaagctgtataactgtttattggtatccattcaagtagagctcgatgaccaaaccgctctgaaattccaagaggacctgctgaacaaaatatatgaaaccggttcgaacggagtggtgatcgatctgacttcagtggacatcatcgattcattcatcgccaaagtccttggcgatgtcattacaatgtcaaaactgatgggcgccaaagtcgttctgactggcatccagccggctgttgcggtgacattgattgaactcggcatttctttggacgagatcgagacggcgctcgatctcgaaaaggggctcgagacattgcagcgggaattgggggaataaatatggcagaccaatcctgtgtgaagattttgactgaatgggacatagtggccgccagacagcttgggcgaaatgtcgcaaaagaactggggttcggcacagtggaccaggccagaatcacgacagccatctcagagctggcgcgtaatatttatttgtatgccggaaaaggccgaatctgcatcgaacaggttcaggaagaaggaaaaaaggggttgaaaatcgtagcggaggatgaggggccgggaatcgctgacatcaaaaaagtgatggaagacggtttttcaacctcaggcggcctcggagcgggcctgccgggagtaaagcgtctgatggaccaatttgaattgcattcggacgcggaaaatggaacggatatacaagccgtaaaatggctgcggtaggagggaaggaatggatttcagggaagtgattgagcagcgctatcgacagctgcttagccgttatatatctgaattaacagagacatccctttatcaggggcagaaattcagcagaaaaacgattgaacatcaagtgccgccggaagagattatcagcatacaccgaaaagttctgtctgaattatatccggatcttccagaccatgtgttccattctctcgattttttaattgaagtgatgattggatacggtttggcctatcaagaacatcaaacattaagaggaattcagcaggaaattaaatcggaaattgaaattgccgcgaatgtccagcaaacgctgcttgagacgacggttccgaaagttgaagcgctcgaaatcggtgcggtcagcattccggccaagcaaatgagcggtgattattatcattttgtgcgcgacaaggaatcgattaatatcgccattgcggatgtaatcgggaaaggaataccggctgcgttatgcatgtcgatgatcaaatatgcgatggactctctgccggattcgggcacgtctccttcacaggtgctgaaaaacctgaacagggtcgtcgaacaaaatgtagacccaagcatgtttattacaatgttttatggcaactatcatcttcaaaaacacctatttacgttttcatctgccggtcatgaacctggcttttattattcttgcagggaaaataaattttacgatttaaacgcaaaaggcctcgttcttggcatttcatcaaattacgactatgagcagtacgagcaaaaactggatattggcgatatgatcgttcttttttcagatggtgtaactgaatgccggacagacagcgggtttttggagcggtctgacttgcagaacctgattactgtacatatggagaaaccggctcagcaaatggttgacaatatatacgaacatctgctcaagcttcaggattttcagcttcatgatgattttactctcattgttttaaaaagaaaggtttaaagcttctcttcgctgggtaataaaccagtagctcattaagagaaccagaggtgatattgtgaatttggcagttgatacgaataaaaatgaccatgtgatagaagtaaaagttgcgggcgaaattgacgtgcacacggctccaacactgcgggatgagctgatgccgctcgcggaagaaggaaaagatctcaaagttagtctgaaagacgtttcatatatggacagcacagggctgggtgtattcgtcggcatttacaaagcggtaaacagaactgggggttctttagtgcttgaaaatctgtcagagcgtttgattcgtttgtttgatattacaggtttaaaggacatcattgacatttctggaaagtcagagggtggattataatgaagagagcagctgattacattgaaatgaagtcacctgccaaaccagaatacgtaggaatcattcgtttaaccctgtcggggattgcaagcaagatggggtattcttatgatgacatcgaagacttgaaaattgcggtcagcgaagcgtgcacaaacgctgtgcagcatgcttataaagcagacaacaacacaggagaggtctccgtcagattcggcgtgttcgaagaccgcctcgaaatcgtcgtcgccgatcagggagacagttttgatattcaggataaacagaaggagctcggaccatattcccctgagcatacggtagatcaattgtcagaaggagggctcggtttatatttaatggagacgctcatggatgaagtgcatgtccagattgactcaggcgtaaccgtctcgatgacaaagttcttaaacagggagcgagttgatgatggcacaaccgtccaaaactacgaaactaactaaaaccgaagtcgacacgctgattaaaaaatatcaggagaaccaggatgaagacgctcagctgacccttgttcaaacatataaaaatctggtggaaacactcgccaaaaaatattcaaaaggaaaaagctttcacgaagatctatgccaggttgggatgctcggattgcttggagccatcaaacgctatgaccccgatgtgggaaaatcgtttgaagcgtttgccattccgaccatcatcggagaaatcaaacggtttctccgagataagacctggagcgtccacgttccgagaaggatcaaggagctcgggccgagaatcaaaatggcggtggatcatttaacgactgaaacgcaaaggtctccaagagtcgatgagattgccgagtttcttgacgttacagaagaagaagtgctggaaacgatggagatgggcaaaagctatcaggcgctttccgtcgaccacagcattgaagctgatgcagacggcagcacggtgacgatcttggacatcgtcggctcgcaggaggaaggctatgaaaaggtgaaccaaaagctgatgcttgaaagcgtattacacgtactatccgaccgtgaaaagcaaatcattgagctgacttacattcaaaacaaaagccaaaaagaaaccggcgaaatgctgggcatatcgcaaatgcacgtctcacggctgcagcgcaaagctgtcaaaaggctgagggaagcattggctgaagatccgtatatggagcttaaaccatgatttggactgagtcgaatgaacacatgcaagcgcttgtttatcagcttcctaaagaaggaaaagccgtctgcggtgacagtttttatttccatgcgactgacgaaaccatggtgtgcgcactggctgacgggcttggcagcggtgcgttggcacgcgaatcctcttcggtcatcagcgaagttgtcgaagagcacggccatgaagatgtcgaaagcttgatggaacggtgcaatcaagcgctgaaacataagcgcggtgcgaccgtttcaattttaaaagtcgattttcgaacaaggacgatcgcttacagctctgtaggcaatattcgctttatcttatacgctccttcggacaaatatatccaccctctccctgtgacgggatacatgtcgggaaaaccgcaaacatacaaaacattcacctatacgtatgaaaaaggatcaagattcatcatttattcagacggtttggaagtacccgccctccggacttatttaaaacagcaccatacaccgggagatatatcgaatcagcttgaatcatacacacgaatgggaaaagacgatctcacctatatcattggacagcttttttaaggaagctgccctttgatataggtgtttttccgtttcttttggtacactaagaagacaacattcttttggaggctacaatggatactttagcgtcaatcgtcaaacaaatcgcaaaagaaacggggcttgcgccaaagcatgtcgagagtgtcattcaattattagaggacggcaacaccgtcccctttattgcgagataccgaaaagaacaaacgggctccatggatgaagtccaaatacaaactatctccgaacgctggggatacattcagcatttaaatcagcggaaagacgaagtcatcaggctgatcgatgaacagggcaagctgaccggacagctgaagctggatatagaaaaagcggacaagctccaggaagttgaagacttatacagaccgtttaaacaaaaacgaaaaaccaaggcgacgatcgccaaaagcaaagggcttgaacctttggctgatttcatcatctcgctcccgcgtaatgaagatgtagcagccgaagcccgcaagtacataaatgaagaaaaggaagtcatgagcgccgaagaagcgcttgaaggagcaaagaacatactggctgaacggatctcagacgaaccggaatacaggaagtggatcaggcaggagacttttaaaagaggaacgctgaagtccgcggcaaaagatgccgaagcggatgagaagaaaatctatgaaatgtattatgaatacgaagagccgattcaaaaaatcgttcctcatcgcgtactcgcagttaaccgcggcgaaaaagaggagattttgagagcgtcggtcgagccgccggcagaccgcatccaagcttacttggaaaaacggattttacaacaaaagcaaacaagtgctcaagatgtcctgaaaagcgcgatcgaagacggctataagcgcctgattcagccgtcaatcgagagggaaatcagaaaagaattgacggaaaaggcggaagaccaagcgattcacatatttgccgaaaatctgcgcaagctgctgctgcagccgccgatgaaaggaaagctcgttctcggcgtcgacccggcattccgcacaggctgcaagctggcagtcgtggatgagacgggaaagatgctcaagatcgacgtcatatacccgcaccctcccgtcaataagaaaagcgccgccatcgaaaaagtaaaacgcatcatcgaagactttcaaatcgaggtcatcgcaatcgggaacggaacggcatcaagagagacggaacagtttatcgccgatctcttgaaggacatcgacagaaaggtgtactatctgatcgtcaatgaagcgggagccagcgtctattcggcatcagagcttgcgagggaagaattccccgatctgcaggttgaagaacggagcgccgtgtcgatcgcacgcagactccaagacccgctcgccgaactcgtcaaaatcgatcccaagtcggtcggggtcggccagtaccagcacgatgtcagccagaaaaaactaaacgattcgctccgctttgtcgtggaaaccgtcgtcaaccaggtcggcgtcaacgtgaatactgcatcagccgcgctcttgcaatatgtggccggactatcgaaaacagtcgcggccaacatcgtcaaaaaacgggatgagatcggaaaattcacgagccggaaagagctgaaagacattccgcgcctgggcgcgaaaacgtatgagcaatgcatcggctttttaagggtgcctgacggcgatgaaccgctcgaccggacaggcatccacccggagagctataaagagacgagagagctcctgaaaaagctgggcctttcaacagcccaaatcggcacaaaagagcttcaggacaaaatcaacgaactgaatatttccgaagcagctgaacagctggggatcggggaaatcaccctgaaagacatttgcgcccagctgacgaggcctgagcgcgatccgagggatgaagtccctaaaccgctcttaaaaaccgatgtgcttcaattggaggacttaaaagaggggatggaacttcaggggacagtgcggaacgtcgttgacttcggggcgtttgtcgacatcggcgtgaaacaggacgggctcgtccacatttccaagctcagccattccttcgtcaagcatccgctcgacgttgtgtcggtcggggacatcgtcaccgtatgggtggaagatgtcgacgctgcaaaaggaagggtctccttatcgatggtaaaagatcgataggacttgaagtcagcccgccggaagctttattttccggcgggcttatcttttacatcgcgattttcaacaggatgcggtggacgacgcctgcaatatgtgccggcgtctgaaccatgccgccgttgatccactcttcaaaaatgccgaccgctccggatactagaaatgtaatttccatttcatcgcatgccatctcattacctgattgctgcatcatgctcaattcttcgaaaatcttctgcttgaaaaaatctttaaatttattgatggtcaaaatgtttcctttcggtttcgtcaataaagtgaagattgcagcgttttgataaatatattcagtcgttttttcgatgaaggtgagcagatggtgcggatcttcgcttggaaaataatcatcgtaaaatttccccagctgatcaaacaactcattctcgatttgttcatacaaatcaaaaacatcccgataatgaagataaaaagtcccgcgccctaaatcagcgcgcctcgataaatcggaaacggtaattttattgatttctttctcatggagcagctttaaaaaagcctcttttatcgctctttttgttttaattgaccttctgtcctccatcggtgacctccgtttataaacaaatttacgtatgttgttcattattgaacatctcaaccccaattgccgattgaacaccccatttgccccaaattataatgaacatgtgtttattaatcaataggtgtttattttttaaaaccttcaaatatcaatggcctatcagccgataagttaatcaagcggtttcagctgttttcctgtaaaatgaatgatctttcacttttgcgaataaagtggtgaagtaatgaaaaacagcaaggacaaggctagcaggcggctttttctgccgactttcttaaaatacaaagaaatcaatctacctgcaaagttcatagaggaggaataaaacatcaatgagaacgattataaaggcgagatggatcattgcggcgctctggattgcaatggccgccgtcttattcatcacggcgcccgatatggggcaattaacaaaggagaagggccagatagcggttcctgaaggctatccgtcttcttatgcgaacaagcttctcgaacaaatgtcaaaagacggggatacgaacaaatcggttgtcgtcgtatttcaggacaaacacctcctgccgaatcgggaggcggctttaaaaaaagcgatcaccactttagagaaggattcctcccttcacgtctcagatattacatcgtactttaacgcggatgaggatattcaaaagcagctgttgtcaaaggatcgaacgacgctgctcgtgcctgtcacatttgatgcaaacaaaatcagtgcggccgaatttaaagcaaaggtcaatgaaaagcttaaaactttaaaacttgactacgagatgaccgggcagccgctcatcgatgatgatgtcatgacaagctcgcaggaaggcttgaagaagaccgaatatatcacggtcggttttattttaatcgtgctgattctcgtattccgttctgcggttgcgccttttgttccgcttttggcggtcgcgctttcataccttgtgagccagtccgtcgtcgcctatctagtcaaatacgctgattttccgctgtccacgtttacgcaaatctttatggtggcgatcatgttcggaatcggcacggattactgcattcttcttttaagccgttttaaggaagagatcgcccgcgggaaagacaagatcgaagccattctgacaacgtataaaacggcggggagaaccgttctgttcagcggaatcgccgttttgatcggttttacttgcatcggctttgccgaattccagctttacaagtctgcggtcgcagtagcggtgggtgtcgcggtcttgattttggcgcttctgtcgatcgtgccgtttttcatggctgttttggggaaagtgctgttttggcctgtcagaggaaatatcgggcacccgcagtcaaagctatgggaaaccgccggccgtttcgctttcagtaagccgctgatcagcctgttgatcgtagcggccgtggccgtgccgccgatcttgatgtataaaggaacgctttcctacaacagccttgacgaaatcggagatcaatacgaatccgtcagcgcatttaacaccatttccgacaagttcgggccgggagaatctttgccggtcacggtcgtgctcaaaacatcggatgcgctcgataccaatgacgggctgatcgcgattgaaaaaatcagccgcgccattgaacagacaaacggcgtcagcaaagttcgcagtgcgacccggccggtcggaaaagggctgagcgacctgtacgtcaaaacacaggcgaacgagctgaataaaggccttgaaagcggcaataaaggtctgaaaaagattaaagacgggcttgcagaagcgagcaagtcaatcgcggatcaaaagccgcaaatcgaagcgtccggaaaaggaatcaaccagctgatcaaaggaaccgaatcgatccaagccggaatcagcgacgttgaagccaacatgagaaagctgaaggaaggaacagaccaaagcaaacaaggcgtcgcccaggcgaaaaaagaaatccaaactgcgaaaaaacagctgacggcgcaagtcgatcaattaaatggacaaatcgaaacctacaaagaaatatcgaaaatcttaaaagcggcattgtctcaagccgaaaatgcccaaggcataacggctgacgtgcaaaagatgattgagcagacaaatcaaaatttcaaaaatcttgaaagcgaaattcccgaagtgaaggagaatccttcttatttggcgatcaaaggctcttacacagagcttgcatcggcaatcaagcagggatcacagaaagcggccgtttacacgaagcaggcggcaaacgcgaaaaagcagcttgaagcagcagatgcatttatcgcaaaagcgcaggaagagcaaaaagtgtacacaagcaaaatcgatgctctgataaacggcctcggccaaatcgaaaaagggcttgaagagacatcgaaggggcagggacagctcgccgattcgctgcctaagctcgaatcaggcgcaggtgaggtcgctgaaggccaaaagcagatgaaggaaaaagtcggagaattcgccggccagctcgatcaattaacaaaagggctgaattcaagcgtggacggcctcgaaaaaatttcaagcggtctgatgggagcaggcgactacctggatcagctgaaaaacgcatcggatcaagaaatgtccggctggtttgtccctaaagaagtgctgaaaaacaagcaatttcagcaggtgtttaattcctatatgtcagacgaccgccatatcacgacgatcgatgtgatattggaagacaatccgtatggaaacggagcgattgccaaggtcaaagacattgaagcatcagtaaaacgggctcttcccgacacgcatttgcacgatgcatcgtttggcgtcggcggcgtttccagcatcaacgccgatttgaagcagctgtcagaccaggacttcagcaacacggtgatctatatgatgatcggaatcttcctgatcctcgtcctgctgttccgttcaatcgtcatgccggtgtatttggtcggatcgctggtcttgacgtactttgcatccatcggtgtaaccgaatttattttcacggcgtttttcggctatcccggcctcaactgggcggtgcctttctttggctttgtgattttaatggcgcttggtgtggactattcgatcttcctgatggaacggtttaacgaataccggggaacggatattaagacggcgatgacggaatcgatgaaaaatatgggatcggttattatttcagccgctgtcatcttggcgggaaccttcgcggcgatgctgccgtccggcgttttatcgcttctgcaaatcgccacccttgtgctgacgggtcttttgctgtatgcattcgtcatgctgccgctgttcgtccctgtaatggttcggatcttcggctcagccaactggtttccgtttaaaagaaaagaataaacggctcgtccatccgcagaagaaccattcgcccatgctccccgaaatcgggcggtcagctccatttggggagtaacgggcgccattgtgtgagatgataaaaggaccggtgaagatgatgaggaaacagaagaaaattccattcggactcggatgaacactgctcatcagcagtgtttttttctgtaaaaataccagcactgattcagcaatttaatctggtaatgatctttttcataaaaagctctctgcatctggtttttgagccaattcggcattgctcatccctcctcaggctcttatcataagagtatgggtgtcgtgtattagtttatgccgcccggaatttgtcctgttcaatgtttttaaaaatgaggtggacccaagcaatggatgaacaacaactgcagcagctgacagaacagctttcgctcacatactttaaaaaaccgttccggcaccgcgcttacttcaacagccgcctgaaaacgacaggaggcaggtatttgctgaattcccacaatatcgagctgaataaaaaatacctgacagaacacgggcaaaaagagcttgaaggcatcatcaagcatgaattgtgccattaccacctccatcttgaaggaaaaggctacaagcaccgcgacaaggattttagaacgctattaaaggaagtcggtgcgccgcggttctgcacgccgctcgaaaaagagaaaaagccgcaaagaaaagtacgcacatacaagtgtgaagcatgcggacaaacgtttctccgaaagcggaaaatggatacaagccgttacgtttgcggcaagtgcggagggaaaataaaagaaatcataaaaaagggttgactgatcaggcttgtctatgataaattataaaagccgtcgcaagacgagccacaaagacaaattgttcttcttgacacattttgtcgacatatttataataaaatgagtctgatcattccacagtagctcagtggtagagctatcggctgttaaccgatcggtcgcaggttcgaatcctgcctgtggagccaatggagaagtactcaagtggctgaagaggcgcccctgctaagggtgtaggtcgcgtaagcggcgcgagggttcaaatccctccttctccgccattaggaaaatatgatgctgacttcatatggcccgttggtcaagtggttaagacaccgccctttcacggcggtaacacgggttcgaatcccgtacgggtcatttctcatatgttgggctatagccaagcggtaaggcaacggactttgactccgtcatgcgttggttcgaatccagctagcccagccattatatttgagccattagctcagttggtagagcatctgacttttaatcagagggtcgaaggttcgagtccttcatggctcaccattgttttttcacgcgggtgtggcggaattggcagacgcgctagacttaggatctagtgtctttacggcgtgggggttcgagtcccttcacccgcacttaaaaaacaacatatcatgcggtcgtggcggaatggcagacgcgctaggttgagggcctagtgggtgaataacccgtggaggttcaagtcctctcggccgcataccagagataccaagggttttgacgcccttggtgtttttttgtttcttcaagttttttgattcttgtgaccaaatagtgtccaattggttaaaaataagtcatttaacttgtgagctatttgaggaggaaagacaattctgtgttgttatgttatgtagctcctttggatcaaaggagtttggaatctgtttcggtttattaggattaatcatcaaatttctcatagagggaagaaactaaagttaaaagaaaagcaaactatataaaatagtttgcttttctttttgttatgaattaacgtctttttctttctctttaataactaataaaacaccaataagaattaaaaacgaacctatccaaaatgtcccgcctattttttctcccagcagaagccatccaagtaaggttccaactagaggctgaaaaaagaaaaagagacctccacttgaagcatttaataattgcaatccacggttccataataaaaaagcacaagctgttgaaacaattcctaaatacaaaagaccacctagaattttagggtcaagcagttgtgacgtgaaaattgcggtaggttttacaaaaggagttagtgccacaatggcaacaaaagttgaatacgttgtcacaagtaaagacgaatagctgttgggcacgagtttgataagcactgacattagcgcccatgtaagtgctgcagcaagcagagaaataccaccaatctgattagaagtatcaatatgaccgtttccaacaataaataatacgcctatagtcgctaaaataattgaggttcctttttttatattcaatggttctttaagtaatagacgagcaaaaataaccatgaacgctggtgtggaagacgtaataatcgcccccatttgtgctgaagataacatcgttccatattcttgcgtaacaattgaaattgtgttgccaactattccaatgacaacaattaataaaaggtcacgtttatgaattttccaagattgtctctttattaaaccaacgataagaagtgtaaggatggcgattacgtacctaatccaaaccaattcaataggcggaattactgcgacaacaaccttaaccactacatacatgccgccccagatactagcggctaaagctaaatatatagaacctaacagggtatttttcatttttttgttccctccgtatttataattaggtcaataaatgccctaacggagagaagtagtcactttactccattaagggcggagaagtgctactggaacatcattttcaaatagtggagctaaaaacatgttttttcacctcaactttattattgcacttattatacaatgtctgttattaagcggcaaacacctctatttatatagtgggagttgtttgaagtaagccgtgggattttcttgaagtgtgttttcttagacgaagataaaattcaatacgtgacacagaagtcatgtttgttttagtctgaaaacagttccccattttgtgaccaaaaagaacataaaatgataagtataatgagtatctgtgaatgcttgatatgacaggcttttgtaactgatgataagctttcactttatattgagggcctagtgggggcaaccccgtggaggttcaagtcctctcggccgcataccagagataccaagggttttgacgcccttggtgtttttttatgtctacttcccacgaattagattgcaccggaaatcgaacgatttagggctgtaattgaaaagtacgcccgtgaggaagttgtttttgaccaagtgaatattatcgaccgattgcgccacgctaaccatcttttgcgccatccaatatcgtgtaatccaccactgaatatcataagttgcaccaccgcttataaaaaagccgccaatcatcattcaatacgaggttggtggcttcttaaaataggaattcagcaatctctggcttaaggggggtgattatcattagtctgtaaggaggtattgtctaatcctccgcccatggctgagaatcactccccggcctttcttatgaaaaatcctttttatattggacggataggtaaatcccagcagctaaaaatgccagcgcatatttgtacaagaaaaagatggtccacatatcatctttaggaaaaatcatgtcacatagaataatgaccaacagcatataggaactacttttcaaatagattttatttgtccgttcgtcgtcttttccaagctttttataaaatacatagaccaaaatcccgctaccataaaccaataaaaaaccaacaacgatgagaatattccaatttcccggagattgttcagcccaggaccttaaaggggaaaaaattgtgttatggatacctgagaaaaacttacttatcattttgatcatttcctttcacataagtaaaaatttcgtttacatcaacattaaaaaattcagcaattcgaaaagccaacagcagagtcggaacataatttcctttttccattacgaaaatggtttgtttggaaaccccgactttctccgctaattcttgctgagacattctggcaagtacacgatattcataaaccttatttgatatcgaatcaccaaagtctttcttcacgaccatcacctcttgaatcaaattataaacttactttttacaaaagtaaagtaaacttatacaaaaggataaaataattttatttttgtttaggttactttgatataacaagagccaaattgcagaaagaacctgacgaaattcttgttccgtcaggttcacattttgctctggtgtaattcatggtttttaatggggcattttatggttttcggtggggcaaagaccggtaagaatggtgcggtcgggtgataatattcactagaaaatcaactttgataagctttactgaaaagcttactccataattaataaaaaacaatcaaattttgtgtaatcgattaaatagatgcaatgaaaataagctttcataaaccatgataagctttcactttattgagggccacccccgtgggaggttcaggtctctcggtttaacaccaaataataccaaagttttaattgcctttggtattatttttttgcggaaaatcggcaaaaaatgtacagcattgtccaagtctgcaagtatatttggcactaaaaaagtgctgacctctgcacaaaaccgttgtgcgagtctgcacttttattctcaagatacactgcctattatcatcgattatgggaagtttatttaatccgttcttagttgcgctgatacttggcttttagaagctttttttaagtggctaaaaccaacaaattttttgctttcttcatcccatagtcggaactttaacgacttaagacttgttgccagtgtaatggttggaacgttttgcaatggttcaatgttgttatgcacttcttcaagcttatagtttgggactctcgggcttaaatgatgaacatgatggaaaccgatattgcctgttagccattgcatgacttttggaagcttataaaaagagcttccttcaactgctgcttttacatattcccaatgctcatcttcttcaaaataagaatcctcaaacgtatgctgaatataaaacatccaaattccgagagatcccgatatcataaaaattggcgcctgaaccagcaggaagttttgccagccaatagcccagcataaaagtgctgtcaaagcggcgattcccaagttcgttacatacgtattcatccgttctttgcgttttgcccctttacgattaaaacgattggtaatcccgaagacgtaaatcggcccaatcataaacataacaaacggatttctgtataaacggtacattatttttgtcttagttgaggcttccttatattcttcaacggtcagcaaccaaatatcgcctgtacctcgtttgtccaggttgctgcttgtcgcatggtggatagaatggtcgcgtccccaatgatcaaaaggatgcaaagttagaattcctgtgattgttccaaggattcgattcgcctttttgttcttaaaaaaggaatagtggcagcaatcatgaaagatgatgaaggttctcactaaaaaacctgccgcaacgatagaaatcgctaatgtaaggaaataagaaatcgacaagctcttatatgctaaacaccataacaggaaaaatggtatcaatgtgttaatgatttggtaaatgcttttttgtaaatcggacttttcataaggtgtaactagttttctcaaagtctttagattttggtcattcatttttaaaagtttccccttccctgatgagtttctaagtttacgttagtccaagcgtcatacatcatataagtatcgttcttagccctctttattggaaactcgaaactgatttccagctcaattttatgaaaattatacccggctctttatcgggccaaactctctccctgcttccctatgggaattgtttttttttagaccgtgaacattgattgtttaactaacaaacatgatgaacaagaaacagcagagctttttaaagaaaatcaattttagcaaagaaaaaggtttgaagacactcgtgattcattttcacggtgttttcaaaccatagttcttagccctctaagatatgttgtaaattttatgcggaatgattgacgcctatcgcttctgcactgatatccacgcgtttaagaaataatgccatgaataaaacaataataggaattgcaattatttccgtttcctgttatgataaaggagaattatttttgttcggtgtaaaggatagtatgaatattgacttttcgtcttgatgatactttgggcaaggatagtaatacaatgtgcggtaacgcactaggaggcaacaaaaatggaacaaggtacagttaaatggtttaatgcagaaaaaggttttggatttatcgaacgtgaaaatggagacgatgtattcgtacacttttctgcaatccaaagcgacggattcaaatcattagacgaaggtcaaaaagtaacatttgacgttgagcaaggtcctcgcggagctcaagctgctaacgttcaaaaaactgcttaattttcaatcgtttatacaaacaggctctctatgtagagcctgtttttttatgttctctgtataatgcttaataagaaaacctactcaacgttcgagtagggagatggtgcaaagcaataaaaagaagatttcaagcttaaaaggttgtttacagtataacatactggattgacaatatgcggaatgtatataaattatttatttttcttttcgaatacaactacttctcattctttctttttggttacatctccttcatgcaaagttcaacagtatttttccattcaaacccggctgttcataatgcttcaaggcatcataaaaatcttcaaaatcatatattttttctggggcattgatgaccattcttccgctctcaacaagcttaatcacctctgagaagcgattgcggtattcagaaacagaatgtctctcattccaaagtcttaaggcgaataattgcggtgacacatggtatacatcgtgtagctttcgccaatcgtttggtatacctgacaatagaccataactgacaaacgtcccttcaggttttaatgccctcgccagcagttcgccgctttctcctcccacagagtcaattgcatggtcaacaccgatgtcgcaaccatcagaaatcttttcatatatagaacctttggaagcgtcgatggctctccatgccccgagtttttgaagtttttctatcttgcggctgtttcttgtcatgacaattaaacggaatcccagtattttggaaatttgcgcaaacaaacctgcaatagatgtacctccgccattcattaaaacaatttcattcggctgaacacgcaatgattccgtacaaattagccaggctgttaatggattaatatacagttgactggcgtcgttatcacttattgatggaggaagttctatagcataatcagcttttgtggttacatattgttgccaagttccctctcctcttacagggaggaccctttttccaatcaatgatggtgatacatctttgccctgatctatgacaatccccacaccatcatatcctgcaacagccggcagcttaattctatgagaataggctcctctaattggaagcaaatctgatggattaattggactggcaatcattttgacaagaatttcatttggctgaagaggaagcttttctccggcatgtagctgtaatttttgaagcggatcaccgaattccttatatattaatgaaacattattcatgatttgttattggctccttaggttaatacttctataaataaagttgcacttatttgagattatgtcaatattgtctttcttttaatatattgaaggggggtatgaataaggaggaacaaaatagggaaattctcaactaaacttttaaaggcttggctcgcaatccccagatggttcagaatgtttacgctaagtgctatcacgatatatattttatggtcatttttctttaatgggataaaaaatatatttaggttagatacctctacattagttataagcttaatagcatccggaatcatattgatgattttcaataaaggttctgtgaaaaagtagggagcggcattaaaaacattccttatcgtcatgtacgagcgtctgtaaagcgacccaacacttttccagcaaacggcataaacaaatgaagggccagccctcctaaacaaacggttaataaagttccgatgccaatcggtccttttaacatgacggccgctgtcaagaagacaaggtaaatgatggttctcgaaaaaaatatattggttcctgttaattcttttatgatgaatgttagacggtcaattggcatcgaagcaaaatttgtgtataagtatgtcgcggttcctaatcctgtaacaaccaagccgatcccaaaacaaaccgctttgctgtaccattgttctggtgtcacaaaaaaatgcagcaaaaaaagccacatgtcaatgccgataccggttataaacgctgttagcagccccgaaacttccggtctttgtctttttaaaaccgaattgcagcctattaatagcagagcaatgatgacttcccaacttcccacagtaagccccgcatgtacggccagtaccaccaaaagtgcgtcaaaaggcgaagcgccgagatctgattgaatcgtgaaagcaataccaagggttaagattaaaattcctattacataaaaaagatatttcactttgactcgacctctttttgttttttattgcaaatgcaacaatattccggtatatttaatgtacgctaattatattgcatttgcaacaaaaagctcgaaaggggtttatgatgaaggatattctgcgtgaaattggaatgattgcccgagcattggattctataagcaatatcgaatttaaagaacatgacctgacaaaagggcaatatttgtaccttgtccgaatatgcgaaaacccgggaatcattcaggagaagctggctgagatgattaaagtagacaggaccaccgcagcccgtgcaataaaaaaacttgaaatgaagggctttattgaacggagagatgatgaacataacaaaaaaataaaaaaactttttccgacggaaaagggaaatgaggtatttccttttataaaaagagaaaatgaccattcgaatcgtgtggcattagagggattttccgagggggaagcggagatcatcttcaatcttcttcaaagagtaagaaaaaatgtagaaaaggactgggaattcgtgaaaaaggggaacaagagaaattattgacacgtaaaggagcggcagattgaaatgacagtaaatataaaaaggtgtacccttgaagacttacacaagcttcaggaaattggttatgaaacatttaatgagacatttaagcatcagaattcgccagaaaatatgaaagcctacttggacaaggcatttaacttaaaacaattagaaaaagaattatccaatagctcttcgcaattcttttttgtttattttaacaacgaaatcgctggatatttaaaggtcaacaccgatgaggcccagtctgaaaaaatgggtgatgaatcacttgaaatcgagagaatttatatcaagaacaactttcaaaaacacggcctgggcaaatatctgttcaataaagctgtggaaattgcaaaggaactgaataaaaagaaaatctggctgggcgtatgggaaaaaaacgaaaatgcgattgctttttataagaaaatggggtttgtacaaaccggcgcccactctttttatatgggagatgaagagcaaacggactttatcatggccaaaacaatcctataactttttaaaaggaggatgacgatgtatattccaaaatattttaaagtcgaaaatgctgatgaaattttggattttgtccaaaaaaactcttttggcacgattgttacgacagaacaagggaagccaatcgcgactcatttgcctttagggctcaataaaaaaggcgatgattactatatcactggccatatcgcttatggaaacccgcaggtgggaactttggaaacctgtaaagatgtgcttgtcatgtttcaggggccgcacgcatatatttcttcttcctggtatgggcatgaggatgttccaacatggaattatcaagccgtccatatatacggtaaagcaagcattctagagagagatgaattaatagaagaattaacaatcatgatggaaaaatacgagaagcatcgggaaaatccaattttatgggataacctttctcctcaacttttggagagacaactgaaagcgattgtcgggtttaagattaaggtggaagacattcaggctgcatataaattaagtcagaaccgaaatgatacagactacatgaacatcattgatcaattgcaaaatgaaggagatccagattcggagcaattggcagcagcgatgaaaaagaggctggaaaattagatataaatctaccttcaaccctttcgtataggaattaaaggtcggaatcagagcagtcatatttgcagcatcataaagagcgagaaatgaaaaggcaggccgaatgatttgctttttttatgtcgtgtagagttgtttattgtgaaaagggcgaataaactttgtcgaggacctaatggggagggggacaaccccgcggaagttcaagttgtctcgaccgcatcataggaataccaagggttgataagcccttggtatttctttcttccacttgattctagtgagcaacatgtgaagggcaaaaatcatgtaacatgacaaggcgatggaaagctatctctattattatggagagtttcgactctattattttgttgtcatcccgtttaaaaaattattgggttaaaatagggatttcactaagcaatttcttcaaatgaatagaatcccacggcaaatgctcggttatacctaatccaaccacatccgtttcggaagagagttctttcagaagatgaagcaggtacggcatttgcattgttccctcaggagaaaaatttacaggtgcttcaggattggcgaataataaagaacgaaacgccttcggatcaagcacgtctaaatcaaggtgtattgccagatacttgatgttgctttcttttatccattcttttataggttcggtactggtcattaactttttagttccggcagttctaatcccaagtctttgaatcacttcagtgtctggttctgtgggagctataccttgtctttgaagttcatttgatatcacttttgtttcttcttctgtaggagctgctaatcccgcaataaagacattttcaggtttcaggggaattttcacatgttttgcgaactcttcatctccttctcccaaaagattcccgagcggtaatgtatgaccgttgtcataaccggcatatctaactaaatcgctatgagcgtcaatccaaattaaacctaagtccccgccgtatcgttcgtttaaataagcaaatggtgcttgttcgactaagcagtcaccgccaaacatgacaatgcgatccggcttatgagcatgaatgatatgctgagcagcctccaattgttccagcagttgttttctcccgtttatcccgttttcgttttcaagcggagttccatcataaggttgaaccggaacatgaataaggggctgatcattttcaggagccagccaagcaagcagttctgctccaaaagagtagttgggattgtttcccccttgccattgcggcattaacagacgaattgtttttttagccatgttttagtctcctttacttcaaagtaaggttagtataaaatgaacgcaaataaaaaaatagtacgcactttaatgacaggtactatccaaaaggagagtgtaaaaatgagtatggcagaatataaaggtaaagtgaaaaatattcaagatacaccttttggatacacattgtctgttatcggcggtaaatggaaaatggttattatttacctcctggcagaaaatcaaccaattcgcttcaatgagttgaaaagacaaataggggctattacttataaaacattgagttcacaacttaaagaattggaagcggatggactggtgaaacggaaagagtaccctcaagttccccctaaggtcgagtacagtctcacggataaagcggaatccctattgccggttttagaagggttatgtgaatggggtttaaaaaaccaataaagttaaggtttcattcttactggagagggaagaatcaaaaagcttcgttctattgccaacaatccttttgtttgtctggaaatgtcaatatagattaactgcagaacgatgtgtcggttgcttcttaagagagggcctttagtgttgctaaaactgggtgcttgcaatatagctttgtcggcacatgaatgttccaagtctaaaagggttaccttaattcaagtaaagagcggtattcgcggcagcctgcttaccatgatacgtgattgaactttttaacagaataaatttattatggtatatttaaatataacgtaaaaattgaaatgaggaatggcatgaataaaatcgaaaaacataggaaatttagagcgaagatgattttcaaagtcataatggtcatgatcggaggaatcatagcggcatatggattggaaacagtgctgattccaaacagtgtatctgatggcggagtgacaggacttagcattgttggttcacaactgtttgatttgccgcttgggattcttatcgcggttttaaacataccgtttgtctggctgggatataagcaaatcgggaaaagctttgcgctattgtccattatcggaatcgcatcacttgcagcagggacaagttttatgcaccacactccagctataatcgaaggggataccttgctagtcactgttgtcggggggatcatccttggatttggaatggggctggcgctccgcaatggcggagcattggacggaattgatatgcttgctgttttgttatcgcgaaaattgccatttggaacgagcgatcttattctattctttaacctttttgtgtttatttttgtttccgctgtatttggcttgcagggggcattgctgtcagtcattgcctactacatcgcgtccaaagtcattcatgttgtcgaggaagggttaagcggatctaaaacttttcaaatcattacaagcgaacctgaattaatggttgagacaattcgtgatcaattgggccgaagtgctacatataaagaagcttacgggggtttttcccacgagaaatttaaagaaatcacctgtgtcatcaaccgcttagaagacaccaaattaaaagaaatcattaatgaagttgataaaaatgcttttgttactgtatatgacgtagctgaagttaagggcagtaattttagaaaacctaatattcattagcaaaaatttttgagggccttcctaagaaaaaacataccacgtcttgttggtatgttttttttgtccttcgaagcgatttccaataaattgatgatcagtcatcggaaaatagacaccgcagaatacatgagcagcaggcacataaggactcgaaatacccggtcgtgctttgcaaatacccttttaaaaacggagccgaatcccgaccataatagcagcgccagccacccgagaacaatggctaatgccaaataatagattgtcgatttcaaggaatggttgaacggcaaaacgaacgcgctcattacggttaagaagaacaaaatgcttttaatattgatcagctgaaatataaagccggatataaaagaggagcgggcttctgtggaatcctgttttttatttttggtaaagccgacttgcaaagccaaataaatcaaataacacgcgccggcaagtttaaaataaggctctacaacgggaatccaattgtacaggctgattgtaaaggcaccgctgagaatcccaagtactgcaaaccccgccaagataccgctgctaaaacgccatgaacctgtaaagccgaacctttgcgcttcattcatcattaaaatattgctcgggccgggcgtaatggatgtcataatcacatacgaaagaaaagctataatactcatttaatcaccttcatttgctaatgtcatagtgggcagtttttattgtatgataatgataactataaataaaattgaaatatcaaaatgcattattgattttttcgatagatcaagtgttaaggagacatcgaatggaaatcagacatttaatcacgtttcagaccatcgttgaaatgggaagttatacgggggcggcttcgaaattaggctatactcaatccacgatcaccactcatatccaggctcttgagcatgagatcggcggggctttatttacgtatgaaaaaaggaatttaaaactgactcagttaggaagggagttaatgcctttagccgaagaattgctgtcaacccataatcagatcaagaatttgcagagcgctcacgaagtgaagggggtattgaaagtggctgcgcccgagtctttaaccatttctaggctggggccaataataagggagtattcgttgaaatatcctcatgtcaaattgaaactgagcaacggtacatgcggacaaaaccaagtcgacttattaagcgggaatgtggatgtcgctttaatggtttatcccgaaatcgagctggacaaatgcattcgctacacgttggctgaggagaagatcgtccttgtcggcagcagtgaagggcctgaggatttagaagaatatcaaaaacatttttttataacgaatgaagaagactgcagctatcgaaccatgtttgaaaaatatctcttgaaaaacgatattcattactttccaacgatggagttgtggagcatcgaagcaataaaacaaacggtcatgagcggactcggattttctgttttgccttacattacggtgaaagacgaagtggaaagcggtaaactgaaaatccttcctcattctcaatacctcgacccgctttattcccagatgcttatcaaaaagaaaaagtggcagctgcctgctgtggatgcttttgcggatctggtattgcattcgtttcgtgaacctcgattaataggataaaatgaatagtgaaagattcacttgaattccttattttgcagattagatgtgctatgatacaaaaaaagggcgggaatacttttgcgcgaatttgcacctaaagtttttcaaacgacagggattattggttttattttagcttttgtccaaattccaatcggctggtttatcggatttttcttttccggtttgttcttcatgatgttgaaatcaaacaatgaaaaatcgggaaccttcaacatgatggctgggattgcgtgtttattgtattcattctattgtttgtttacgcaagtgttgtgattgatattataaagaaaaaaataaaaagcaggtggatgtcacatttataatcatgagttttaaatacggagcgtgatgaaatgaaagaaaacagccttttccattctgtaccccaaaatctatttgtcttttatctaattccatcgtgtgcatttggaaaccaaaatgggtgatttgtaattgcgaaagttgaaactgttgcttgccgctaatttgatttccaccgtaggtaccggcatcacttcctatttgattgtctggctgctgattgatcaattgaaacaatccgttttatatgggttattgacgatggcaacgatgattttagtgttttttgcctcaccctatttagggagtttggtggatcgatattctcgaaaagcgatattcctctatatggaaattacaggaatagtggtcttgggcgttttttctgttctatgcaatgtttccgccgtgttggacatcacccttgttgtgatgctgattttttatcatacagcttacgattcgataaagtatcctgctttagccgctttaacacaggaaatgttcaaaaaagaggactatagtaaagtgaacagcagtcttgaagttcaggggcaggcggcgctgatgattagttcggggctggctgccatgatgatcggcaagatggatgcggcagttattttggttatgaacatctctacatttatagcagcttccatcctcatctaccaacttccttatcaaagaaatgctgaagcggaagagcattccaatacaatgaaaaatgaatcttactggaaaaacttcagatcctcactccaatatttatgttatcgaaaagttttgtttgttcttttattgacttcttttataccaagcatcgtgattattgtcgcaaactacttggatccggttttcatttacgactatttaaacgaaggtccgtcagttatcggcattgccaatattgtttacgccattggagctatgggtgcgggctttgtcgcatatcaaatatcaaagaaatggtctgatatgcaaggtgttatattgtttatggcagtatttgctctagcaacaattgcgatcttcctcgttccgaatgccgtgacatttatagtggcaagcctcttttgggggcattcaaatgctgcgatcagagtatttagaaaaagctatatgttccatcatgtcgataatgcatatatgggacgtgtcaattcgttgtttaatgcggtaaagctgttgggacaagttgctttaataggcatcttgacgattacagtagtgccggcgggtcaaactgtttacggatacttcgttttattcatcattgtaattgctgctcttttaacaacaacttatttatttaacagaacttataacaaagataaagaaaagcgggtatctttatagagtagcttcccccgtagaggaggcataaaaaagcattgctgtttaaatacgatacttttttatgccaagggagcccccgcgatgatccctaggcttcattcaccgctaagaattgcaaccggacgcgcccagccggccgacgctttttcaacttttacgggaaaagccatgacataaaatccggtggaaggcaattgatccaggttggcgagcttttcaatttggcagtaaggaatggtgcttcctgaataatgaccttcccaaataatcgacgggtctttttcctgttcaaagcgcttggcggtcatgctgaatggagcgtcccagctccaagcgtcagttccgacaaggcgcacgccccgttccgttaaaaaaagcgttgcttcgcgccccatcccgcagccgctgtccaggtaatcgctttgcccgtatttggcaccggccgacgtattcacaagaacaatatccccgggcgcgagtttatgattgatgcggtgaagttcttgttcgatttcttcaggggttacgatatgcccgtctttcagatgtctgaaatccagcttaacgccggggccatgaaaccagtcaagcggaacttcgtcaatcgtcatcatccgcttgccgtcatcagtaacagaacggtaatggtatggagcgtctatatgcgttccggcatgcgttgacattttcactttttccagcgaccagccttctcccccgggaagatcttgcgaagagaggccgggaaagctctggaccatctgtttggctccttgcttatgatccgcatattcgatttcagggataaaccccggcgggtcagacggaatatcgcctcttagcgataccgacaaatctacaatttgattgattttcatctgttttcccctttctgcctaagcggctgaccattgaattgatgtgcggctgttgtctttttaattttacagcaagagccatacaaaaagcccgcagaactttctgcaggcgattcgcattttttctacacttgccgtgacttaggttttctcagcttgtaaatcgcgatcagcatgataaaccaaaccggcgtgacaaataaggaaacacgggtgtcctgcgccagtgcgagcacaatgaggataaacgcaagaaaaccgagaaccacataatttgaaaacgggtaaagcggcatcttgaatttgtttcttttcgctaaatccggtctagttctgcggtatttcaaatggcagatgacggttattccccaaataaagatgaagcatatcgtcgagatgcttgtaatgagcgtaaacacttgctcaggcatgatatagttcagcatgatgccaatcagaataacgaccgctgagaaaaacaatgcattgcccggcactttgcgggaggtcagtttggtcatagcgccgggcgcattatgttctttcgcgagcgagtatatcatccggcttgtgctgaagactgcgctgttgcttgccgaagccgccgatgtcagcaccacaaagttgatgatgcttgcagccgcaatgatgccgaccgctgcgaagacttggacgaacggactctcattaggattgatgacattccacggatagatgctcatgattacaaggagcgcaccgatataaaaaagcaaaacccgaacggggatattgttgatcgctttaggaatgaccttttcgggatctttcgtttcccccgctgtcagccccacaagttcgatgcctacaaacgcaaagacaaccatctggaatgaaaggagaaatccgtgcagtccattaggaaacatgccgccgtggctccaaaggttgtgaaaggcggcagtgcccgaatgggtagaaaatcctttgaagatcatgaaaagtccgatcgcgatcagcgccaatatcgcaatgactttgattaacgcgaaccagaactccaattctccaaaaagcttgacggtggccaggttcatgatcagcaaaatgatcagggcgatcaatccgggcagccattgcggtacatcaggcagccagtattgggtataaagcccgaccgcggttaaatcggccattgcgagcgaaatccagcaaaaccagtatgtccaccccgttataaatgccgccatgtcgcctaagtagtctcttacaaagtcgacaaacgaatggtattccaaattggataagagcagttctccaagagaacgcataatgaaaaaacaaatgattcccgtaatcagataagcaaataaaatcgacggtcctgcaaaatggattgatttccccgaaccaagaaacagccccgttccgatcgccccgccgatggcgatgagctgaatatgcctgtttttcaggcctctcgataatttttgttcgtgtatatcgttgtcagttacatcttctgtcactttatgtatgcctccattttttgtttttaagcctgatctcccgcatgttttaaaatctattataacattaaaatttgaagtaattgatcatatcggcttgtgggatagagttcatctgttatcgtcgataacacttcaagcagagacatcattcaaaagtatgccgcaaaagatgacagagttataccggtttcccaggaaaactcagatccgaacaaagggaagaaacagtacacggcttgtttttaatggttttgtcattgagaggtcctaaaacgccaagctgctgcgctcgtccgctttcgtgatacaatataagcacctgagagagcatgatgttttaggagggacaaaagctgaacaaaaataaatttaaacgcagtcaatcggttttttcggcaatgctgatcctaatcgcggtgtatgttctgtatacattgtttgaaaatttaattcttgatccgcaatcaacgtcctttctgagccataaatctcacctccgagactcctttcacctcccgatctggctaaaggtgatgtatgttcatgtcattgccgcttgtttggcgatggtttcgggagctgtcaacttctccagcggcttgttggccaaaagccgcaaaatccaccggcttaacggctttatttacgtcgtctcggtgatggtagttacgctatcatcaggctatatggcaccccattctacgggaggtagagccgtcagcatagcctttaacatggtgaacatgtattggccggcggccactgttatttccgtcatcaaagcacggcgaaatcagtttacaaagcatcggaattggatgattcgcagctatctattctgttttaccaatctgtttattcatttcatcacgtttgtgtgccgaagcggattcggtttgccatacgatatcagctacacgataggcgtttacggggcgattgcactgaacgtggcggcagctgagttcgtcattcattttacacgcagaaaagcggtggacattttgcatacagctggattcgataaggtatagataattcgctgtgccaagggtatttgagcccttggcattctgtttttttagctcttacaaacaagtacagggctataactgttgcggcaggaaccatttttctcttgatctcttatttttatgtaagtttaagctgggtttaaggtcagtcatgtaaactttgaaggataccgtatatggaggaatagaagcatggatgacagaattgaaacaaaagagccgatgccttcattaatcggcttgatcacgaacccggcattgcagtttgaaagaatgaaaaggcggccggcggttgctctgccgatgtttattgtattcgttttatcggttttatctgcttatctttatatttcaaaagattttcccgatacgtatacctactttggaatgatcatatttttatgggagtttttaaagacggggatctatttgtttgtatcagctttaatattatggctgatcgcgacaatagggggcggaaaaacaaactttgtgacgatgttttcgttggcgtcttttgtaggctttgccaaaatcattggcgacgtgataaacaatacagtttatcgttttgcgaatgtgccggaagggacttcgtttacatctttgcacgatgttttttcggccgtcgagccttataaaagcatattgggcgtgtttgatatctttatggtttgggcgcttgtgttagcggctgaaggtcttcagaaagcgggtggagcttcgaaacgggcttcatggatcgccgttgcagttttatttattctcaagtttttgttcgcttgtttttttggtttgtttgccgcattgtttgaggatattttttagaatttcgattcggattatttcaatatacaaaatcagtttctcgcgaggtttatatcggtgttttttttctctatccgctaaaagggagcaagggctacggagcaaacctttatatatggtttgctctttttttgtttctcatcattgatttgcgcaaaccggcattctggcgactcaatttccttcgcctccctttccggtatttttcagggtagaataaatgaagtgatgttttctttaaaaaaaacacgtctttccgcaaactatttttcgcactcccgcgtctatcctaatgtaacagccgtatatacgtatattcgaaaaaggagttctttattgcaatgaagaaacaagcagccagagcgtctcttgtcgcttgcataacagaccggaaagaagacttttaccggctggcatacagctatgtgaaaaatcaagaagacgccttagatattgtccaggaatcaatcaaaaaagcgctcgattccgtcgattccgttcgcaatccggatacgatcaaaagctggttttataaaattttggtgcggacggcaatcgattttttgcgcaaacagaaaaaactaaaggttatggatgatcaaacgatcgagtttttaagccagggcaaggaagatacctaccgggatacagatctccatgaggcgcttgatgagttgccgcaaccctaccataccattattgttctgcggtttttcgaggatctcaaactggaagagatagcggaaatcacaggcgaaaacttgaatacgatcaaaacgcgcctttacagaggattgaagcttatgcgcatccaattgacgaaggaggatctttcttaatggataagaaattggaacagctgagaaaagcatatcaaaacgtccccattccgaaggagctggatcaggttgtcgagactgcgcttcagcataaaccgaagaagaagagaaggatagtggtatggcccgcatcaacgctggtcgcggcggctgtactattggctgccgtcgtgaatatcaatcccggagcagcgcaggccatgtcgcagatacctgtcatcggcaaggtcgttaaagccatcacattcaccgagatcaaacagaaagatggagaatcgagcattgacgtgaaaacaccggctctttccggcttgaataaccgggagctcgaaaatggcatcaacgagaaatatgtaaaggaaagccatcagctttaccgggaattcatgaaggagacgtcccggaataaaaaagggcatctcagcatctacagcgattatgagacagtcacggatacgaaagatttgatttcgattcggcgaagcgtcgaaagaacggaagcgtccagctataccgaacggcgctatatcaccattgacaaaaagaatgaagtcctgctcaccttgaaaagcttgtttaaagacgaccggtatatcaccgccatcagcgaaaacattaaagagcaaatgaaacagcaaatgaaagatgatcctgataaaatatattggatcggtgacgaagaagtcgagccattcaaacgaatcaaggccgaccaaaatttttacattacagagaatcataaactggtgatttcgtttgatgattatgaagtcgctcccggctatatgggcgcggtggagtttgaaattccgactaaggcgatttcgaacctgctgatcggcgaccgctatatccgctagtgaaagaaatccatgattcgctgaaatcatggatttcttattttttacaactttgtaacaacatattctgcaggaaactcttatactagagagacggcattactcagggaagataaaaatgacgattttttgaaacaaaaaaccgtcctgacttcgtctataatatcggagccgtaaaaggcacgaaacatacagaagaatcgtacgtacatatcattggaggaataccatgcgagatcagacacaacaacaccgttacataccggggttagacggccttcgggcttttgccgttttggcggttatcgcttaccacctcaacatgagctgggccgacggaggcttcattggggttgatatcttttttgttttatcaggatatttgattacatcgattatcctgccggcgtatggaaatgacatttccctcacattccgcgatttttgggtgcgccggatacggcggctgcttccagcggcgacgctcatgattttcgcaaccgtcatatgggtcgctttgtttaacagagagctgatgcataccgtacggggagatgcgatctcctctcttttgtatgtcagcaattggtggtttatctttcacgacctgtcatattttgatagtttcggatcgccgtctcctttaaaaaacttgtggtcactggcgattgaagaacagttttattttatctggccgatcattttgctgttgggcatctacatatttaaaaagcgggagaggtttgcagcggcggttgtgctgtgtgcgctttgttcagccatatggatgagcatcctgtacgtcccgggcggcgatccgagccgtgtatattacgggacggatacacgcgctttcgagctgttgatcggatgcgcattagcccttgtgtggccgatgaaaaggctgtctgggaacaggctccccaacagcctcaagcatgcattgcacggaactgagcttgccgctttcgcgctgcttatgatgtgcatttattttgtcgatgaattcagcccgtttctctatcacggcggaatgcttataatcagcataatcgcagctattttgattgcatgcgtcagtcatccgagcagcttcctgggctttgccctttccgtgaagccgctgcgctggatcgggaaaaggtcgtacggcatttatctttggcactatcccgttatcgtgctgagcacgcctgttcaggagattggaaatccggtgtactggcatgttgcgatgaaggtcgccgttacatttattctggcggaactttcgtatcgctttattgagaagccgatccgaaaagacggttttaaaccgtttgtcagccgggtttttctggataagatcacggaatggaaaacggcttccgttccaagcaaaatatcaatcggcctgatgtttgccgcgctcctcgtttttgcagggggtctgtcgggattggccgacgaaaagaaacagccgcagcaggcctattcaaaatcttatgaggaaacaagcgcctcagcggatcagccggctgacaaaagtgaagaacggcaggacgataagaaagcacaaactgagagcggaaatgagagtaaaaccggaaacggggaggaatcgtcagatacgaaagatgagcagtctgcggaaaaagagccggatcgcatcgaaaaagaagtattggctgtcggggattcggtcatgctggacatcgcttcaagcctgcgccggaagattccgggaatcacaatcgacggacaggttggaaggcaagtgagggaagcgcttcaattgacatcaacctacgcctcctttaatcatccggacaaagccgtcgtcattgaattgggaacaaacggctattttacggacggccaattggacgctttgcttgatgctttctcaaaagcggatgtctatctcgtgaatacgcgcgtcccccgacaatgggagagcaaggtgaatgaatcgcttcggaagcatgcggacagccgtcaaaatgtgacattggtcgattggcacgctgaagcactgcaacatcccgaatatttcaccgccgacggcgtccacctgatgccgaaaggtgctgaagccttggcatcgcttatcgtcaaagcgatgaaataatctataaaaagaggctctcctttaaggaggcctttttttatggcaataaagtcaattgggtgcatttatttttcatgcaaccgcctttcactgttcaaaaaatatggtacaatatacaaatgttttgcagcctgtaacaatagaaacagagatgttaactaggttgatagaaaggttttgatgtttttatgcttcataatccagttggaaaagagaggttggcattggcttttctgctcggaatgcttgccatacttggacctcttaatatcgatatgtatttgccgagcttccctgaaatagcggatgacctgggagccggtgcgtcgcttgtgcagctcagcttaacggcttgcttgatcggccttaccatcggccagctcgtgattgggcctgtgagcgatgcgaagggaaggcgaaaacctttattaatttcgatttcgctgtttgcgctgtcttcactgttttgcgcgctgtcgcctaatatcgcgacattagtgcttgcccgttttttacagggatttaccgcttcggctggaattgtgctgtcgcgcgccattgtacgggacgtgtttacagggagagagctttctaaatttttctcgcttctaatggttatcaccgcggttgcgccgatggtcgcgccgatgacggggggagccatcctgcttttgccgttcgctacttggcatacgattttttatacgctggcattgatcggattgttactagtactcgttatctcgatgaaattgactgaaacattgccgcccgaaaaacggattccaagctcaatcggttcgtctctcaaaacgatggggagcttgttgaaggatcggtcttttatcggctatgcgctgactgtcggtttcattcacggaggcagctttgcctacgtatccggaacgccttttgtatatcaggatatctatggggtttctcctcaggtgttcagcgtgctgttcggcattaacggcctcgccattatttcgggaagctttatcatcgggcgattcgggggaatcattcatgagaggaagctcttgcggatcgcggtcattaccgctgtcatcgcgacatccgttctcctgacgatgacgattttgaaaggaccgcttgcagcgattgtcatttcaatctttatctacatgataaccatcggaatgacgttgacaagcacatttacgctggcgatggaaaaccaggggcaccgtgcgggcagtgcaagcgcaatgctgggcatgcttccgctgctgctcggttcgatcgtttcgcctctcgttggaatgaatgaaacaacggccgttccaatgggtgcgatcatgttcatcactgctgtgatcggctctttcgctttttttgctttaacgcgggaaaaccagggggagcggtaaaggtaaaggacggaatcacttgattccgtccttttgttgttatagaggcgcccgctggatggcggagtctgagacgtccgcggattcattgatagaaatgaccattgagacagcggtcccgctatcaggcgtactttcgatattcagttcacttccgcagaagtgtttcagcctgcggttgatatttttcataccgacactatgagtgaaatgagaagaaaagatatcttgttgtttctccggcggcatgccgattccgttgtcctctatcttgatataatagcggttttcgctttctttttttgccgtcagcttgatccagcctccgcctcttttcttgctgatgccatggtggacggcattctcgacaagaggctgaatcattaaaggcggaagggtaaagtcgatgtcttcctcaatatcgtaaatgacgtccagccgatcgccgaagcgcgttttttcaatggaaagatacgaattcacaatcgacagttcatgcttgaaagaactcatccctgatgtattttgaaagtcaaaactcattctcaagtagtttgtaaaatcagccgtcacttcgcgcgccttttcaatatccaaatgactgagcgcgataatggtatttaatacattgaaaagaaagtgcggcttgatctgcgattggaggaatgccatctccatatttgtcgcttgggctgccgtatctttcatcatgatcaggtttttaacgcgggctgcaaattcagtgtagttgtacggtttctgcaaaatgtcatttgccccagcgtgaaaagccttgtatttatcatggtcgatgatggctgccgtaatgatcagaaccggaagttccaccattgtgaacctttcgcggattttcatgcagacttcaaaccctgtcatatccggcatcatcaggtccaaaatcaccaagtcaagctttgaacgggagacgacttcgagagcctcatggccgctttttgctgcgatgacttgataaggaacgccttcaagcatatcggccaaaatttttaagctttcgatgttatcatcgacgatcaaaacagttgaagcatccattttctttgagtagtacggcgtgctgatagaaacatcgggcagatctctgacggcttgctgttgaggcatgttctccttcttcgcgtcaggaagagggtcattttttgcaacaggcagtgtgaaatgaaatgccgatcctttcccttcttccgattctacccagatctctccattttgaagctgaacgagctgtctgacgatgcttaaaccaagcccggctccgtcgtctttatggttttttgcttgttgaaaagcttcgaatatcaattgacgcacggcttttggtatgccgactcctgtatctgctactgtaattttgaccttctcttggtcgagcctttcggcggagagcgtaatctgcccctccggcgtatacttgatcgcgttatcaaccaggttggtcatgatttgccggaagcggttttcgtcggccaagacgagcggcagtccggatggaacacggtttacaatccggacatttttattttttgacaacagccgatagaagtccatttccgtgctgatcgccgaatgggcatcgacaggaacggcctgaatctgcagcatgccctgcttcattttttccaaatcgagaatgtcgttcaccagactggagagtctgtatcccatgcggatgaccagctgcagattttctttttcttcctctaacgtcctttttctcttccttgccaaaagggtctggcatatattaatcatgctgttcagcggcgttttaaattcatgtgatgttttggcgataaactcgtcttttaatcgattcattctgagcaatttcaaggacaggatttcgttctcgcggaatgcgcctgcgaattgctgcgccatcatcagtacagccgccagcaaagcgatgatcgacggcacggcatagagcgaattgaatgaaaagcctcttttgccgctgtaagcagaaactgtcgttaaaatgacgaatgcgctcatcgagatcgctgcaatcgtaagataaaggctgcctttcattttccgaacagcagaaatcgcaaacacatacgtaatataaatcaaagtcgtgacggcaagaacagagtgcaatatatatgcgagacggtctgtgtaaccccaggtaataaaatcaatcatcaaaaccagtacagaaaatgcagtcgcggcgattatccattttttcgaaacgatttctttgtaagcgaaatatagatagagaaaaaccgccatactgacaagcaccattgtggtcgccctcacgacgcttaaagctgagaatgagatagacggaaagagaagaaagatcattcgttctcttccgattaaaagcactatgaccgaaaaaagaagacacatcgtggaaaaaaagaataagtgcttatcctttcttcgatgcagaaaaaagccgagaaagtataaaccggtaataaagaatgctgtgatcatgctggtttcatttaaaaaagagattttgctttggtgtaaaatgtgctgctgcatcccaaaggcaatcggtttttctatcccccatgaaggtgtttttttgaagttcgaaaattgtacaatcaactcgttgtctccgcggcgaacctcgaaaaaactcgtataaggcctgttttgcgccgtgaaattcgctttgtttgaaggggttccgctctgcccgatcaatttgccgttgaaataaactcggtttgcgctgtttataaaagaggtgctgattccgaacatctcattgtcttgctttgaccggatcatcagtctgtatgtaccgtaatccacgttttttcctgaatcggtaagtttgacattgttaggcacatcggaataaatgggggcttttcctttgcctgcatgaatgtcctttggggagagaagctggtttcggtatagtgcccattctccggtgagcgcgatgttcccgtctttctgaaaatcccatgtttccagattgatgattccttgcttcgcttcagggtagttttgctcggacaattggttgttaatgaataagaaaataaaaaagaagccggcatagccgagaataatcgaaatgaaaacaaatagctttttcaacatgagcactcctcattccacctgctgcagtcttgtcgaatcttatgaatattgtactcttaaatgttaataaacgacaagattaagaaaatgaatccaactaaataggtccgtagacatgatataatcattatcataatttccagatgattcgatgaaaaatggggtgggtgtgtcgtgaaagcgttaattgtggatgacgaggaactggcattgcttcattttaaaaatatgcttgaacgaacaaattgctttcgattcattgaaatgtttcaagatccggctgatgttctggaatatccggatattcgggatatagacacggtgtttcttgacattgaaatgccggggataaacgggattgagctcgctgaagcgattcaatcgatgaatgaaaacattcaggttgtttttatcacggcttataacgattttgccataaaagcgtttgaattaaatgcggtggattatttgcttaaacccgtcgattacgtccggctcgtgaagacgattgaacggatcagggaaaacagcttgctaaaggcttcagcggtaaatgccggaggggactatttcatccaatgttttgggaatttgcaattttacaaagcagagaagggcgtcaaaacatatatacctgttaagtggagaacatccaaggcccgtgaaatttacgcgtatttgcttcatcatcacggccatgtgatcagcaaagacgtgctgatcgacctgttctggcaggatcatgatgtctctaaagcaagcactcagctatattcagcgatttatcaaatcaggaaattaatcgataggcttcctttcggtcaatccatcgagaagactgacacaggatatgtcctccggatttccggtgtgaaagtggatgctgacgaatgggaaaagtcgctgaaagaggctcctcccatccatatggcgacgatcaacaggcacatggaattgctgcttgcatacgaaaaccattactttatggaacacggttatttgtgggccgaacccgaaaagacgcggcttgcccggatctggcttggaaaagcttatgaactggtcgattttcttattcatgaaaaagactaccgccgggggcttgatatatgtctgctggtcgagaaaatcgaaccgtgcgatcataaaatcatccaatacaagatgcagctgtttaataaaaccgggaatgtagaagaagcgatcaaggaatatgagcgctataaacttatgaaggacaaaatgaattaaaggtaaacgcgagaccggatcagccggtctttttttatgccattttcagcttacatttcgatgttcagaaattgtatagttccatcccatacaatgtagtttggttcggatgatgtcagctgacataaagcaaaattcatacccgcgacatcttgactaccgccgctaaacatacagcaacgattttaaaagcctgtcattctgcaaatagaaaaaaattttcaggagggaggccgtccatttccaggctcaatcgatccgtacacaaaaacattataaaaggggaggaatcacaatttgagatcgaaaaaatattcgttcagcctcagcaaaaaaagagggctgaaatcatttttggtcacttgcctggcattgtatttgatcttcagtcaagttgtcggctttacgctgacggcagtggctgccggcacatcaacaggcggcagcgtgttttttgattcagtgacaatcaaaaacagcgaagatcaaacggttgacggctcaaagggagacgaaccagcattaaagccgggagacaaagtgacactcacatacgagtggtcgttaaaaaacgatgaagaagccggcgccgaaaacagtttcactgtagaggtacctaaaagcttcgaattcgctcaggatgccgagggagaagtgaaatcggcagatcagcagatcatcggcagctatcaagtgaaagcggacagcaacatttttaccgtaactctaaaaagccctgccgagggctctgccggagcaaaaggggccattgcgctgtcagcaaagtttgccgcagatatgaaaagcgatacaaaaacggtcacagctctctttcaactcggagcaggcaagacacagcaagtgatcatacccgtgaatacaggctccgaatcggaaacggcgaaaaatgatcctccgtcatctgaggacgatcagtcagacgatcaatcaaaatcttcaggaggacaggaccaagaggaaacgaagaaaaaagctgccgacgctgagaacagcgattcaaaaccggcggcatcttccagactggcggcagccggaagccttgcgtccggtggcaatcaaatcacccaaaatattttaaccggcgtgacgctgacggatgagcacggaaagccttatgacaaaagcaatcgagccgacacgaattctccggcgaaaatctcaattacttgggacatcccgaatgagctcggaaagacgataaacgacggcgaccgctatgaatttgatctgcctgaagcttttatcatgtacaacgacattacgaatcagccattaagctcagacggcatcacgtacggctatttttcaattgatacaaaaggccacgttgtgatgacgtttaacggcgaagtgaaagaagattcgaatgtcaaagggacgttgtttgtcaacacccagttcaacgcacaaaaaataaaaggctcgacgactcaaaagattccttttccggtgaaatcagacactccggaagtaacggtttatttcaaaccaaaagtaagcaaaaccattgataaatcaggaactttcgataaaggcatcaaccccgggcaggtcacatggacagtcgacctcaacaaaaaattggatcaggtgaaaaatgccaagctgcagaactttccagaggggctgacctatcgttctgtcaaagtttatcagctggatgtcaacatagatggttcagtcagccggggagatgaagttctttcaggctacaccgtagacgcagatggaaatgtcacattcgacggtgagatagattcggcttaccgcctcatctatgtgacggacatcgatgactccgcaaaaccgaacgaaggcggaaacgctgcatttaggaacaaggcaacgttcggcggagacaatctggaaccggcttctgcagaggcctctgtcacggccaaatacgggaaaatgatcgaaaaatcgtcgacaggttataaaagcgattcacagacgttcagctggacgattttatataactatggagagaaaaaaatcgacgaatccaaagcgagcataacagactcgtttggttccgctgatttgcatcttgtttcagattccttaaaggtgattccgattactttcaatcagaacggcagtgagcaggctggaacgcctctaacggaaggcaaggattatacgctctctgataatggaagcgggtttgaaatcaaatttaaccaagatgttaccggagcttacaaaatcacgtatcaaaccgaggtcaacagcggagtaatcatcgataaatcaacaacctatacgaacactgcagtgaccggaacaggagaatcaaagaaagcttcaggtacagccgttcagcagaatttgataaaaggctactcaaacattgattacaagaagaaaacggtcgattggacgatcgcaatcaacaaaaacaactacacgatgaacaattggaagttggatgacaatttcgaaagcggcgggctcacgctcctcgacggatcattccgccttcaggatgtgacgaataacaaaacgcttgaagaaggcaaagactatacattgataataaaaccggatcatgaaggttttctcctggaactcatcggagattatgcgacaacgaacagccagcttaagatcacgtataccacgaatatgaatgccgacttttccaacgaaaatgtcaaaaacacggcagaatcaacgtggactgatcacagcagcactgaacgcaaaaataaggaagcgagcagttttacgccgaatcgccagacatcccacaacggcttcaaacacggcttatacaacgctgtttcaaaagaaatcacgtggaaaatcggcatcaactataatggagagccgtcaaaaaacccttatattaaagattctttagcagatgaccagcaatttgaaaaaggctcggttgtcgtcaagagctattcagttaataaagacggttccatcacagaaggagacatcctgcccgcctcccaatatgatgtggaagagccgtcggctgccaataaacaaactttgaccgtccatttgaaaacggacgattccgtcccgtatcttattgaatttaaaacatcgctaaaaggacaggtcattaagcacgatccttacaccaataaggccacgtaccataatgccggatattcagagcgtgagttgacggcatccgtttcggtcgcagacggaggaagcctcgttttcaaaggaggcaaacaaaacggaggttatgtcgattggagcatcaatgtcaacgcgagccagtcggtgttggaagatgtaaaagtcaccgatactccggataccaatcaaattttagctgaagattcttttaaagtttatcaggctaaatatgatgaaaaaggtgcagtcaaagacagcagcggaaatcttgtcccggatgatgttcagcttaagaaaggcgaggactatacactggatatcaagaccgacaatgcaaccggcgaacaatcatttgtcctgaaatttacaggcgattacaaaaaaatcgaccgcgcctatgttattcaatatcaatcattgatcaatattgccggcacgagcggccatgttaacaacaaagtgtcgatttcgggaacgaatgtccaggaacagacccaggaaaacaacagctcggtctttgttgccgtttcaagcggcggcggttcaggctcaggggaaagaggaagcctgacaatccttaaaacgggagaagacgggacgccgctttccggagcagattttcaattgcggacaaaagataatgagcagctcctgcggacaggaacgactgacgacaacggcaagctgacattcggcaatattcgctatggcacttacattttaaaagaaatcaaggcgcctgacggatatacgatcagcgacgcctatgcagacggggtctccgttgagattaacagcagctcttcaagtgccggagcgctttacaaagtcgtgaatgagaagaataaggtgacgcttatcaaacaagacgaacaaaagaatccgttggaaggagccgtgttcaagctggagaaaaaatccggcgatggcgcctttacgacaatacgtacaaatattaagagcgacaaaaacggaaaagttgagatcaacggtttgccgcccggcgattatcgtttgctggaaacgaaagcgcctgaaggttatctcttaaatacaaaagaactcggcttctccgtcaaaacgaatgataagaatcaagtacctgacgttgatttaggaacattgatcaactataaaggcagagcacatttaacgaaagaagatgcagaaggccgtcaattagagggggctgaattcaagctcattgatcatgaaggcaaaaccattcatgaaaagctcacctcagatcaagacgggaaaaccgcggtatctgaccttgcgcctggccgctatgcctttgttgaaaccaaagcgcccgagggctatgtgataaacagcaaggcaatcgagtttaccatatctgaatcggcaaaagaaaaaccggaatccgtggacgcaggcaaagccgtcaactataaaggttcggtttatttgacaaaagaggatgcggaaggccgtacgctgaagggcgctgagtttaagatcgttgatcatgaaggcaaaaccgttcatgaaaagctcacttccgatgaagacggaaaaatcgcagtttcaggcctggcgcctgggcgctatgctttcgtggaaacgaaggcgcccgagggctttatgttaaacaacgatcaaatagaattcaccatcccgggctcagctgaagggaaaccggagccggttgatgcaggcgccgctgttaattataaaggctcggttcatttaacaaaagaagatgcgaaaggccacaagcttgaaggagccgtttttaagatcgcagatcaaatcgggaataccgtacaggaggaactggtctcagatcgaaatggaactgttacggcttcaggcctggcgcctgggcgctatgctttcgtagaaacgaaagcgcctgatggatttgtattgaacagcgggaaaatcgagtttgtcatcccggattccgctaaaggaaaacctgaacatgtagatgcgggcacattcgttaactataaaggttctgtttacttggagaaaaaagatgaagacggcaatggattagaaggagccgtgtttaaaatcattgacagcgaaggcaaaacggtcaaagacgatttgatctctaaagaaggcggcaaaatcgaggctggcgatttggcgccgggaagctatcaatttgttgaaaaacatgcgcctgacggctacctgctgtcaacagatccgatcccattttccattaccgggaaacacgaaggtgagccgaaacaggttaaactgacggctctcaacaagaaaaacagcgttgtgctcacaaaagtcggccaggatgacaagagcgccggacttcagggagcgcagttcgatttgacagatgaaaccggcaaggtgctgaaaaccggtttggcaacagacgcagacggccggatcacagtgtacggtcttaagcccggtaactaccaatttgtcgaaacaaaagcgcctaagcattatcaattggataagacgccaatatcgttcacagtcaaaaatactgatacaaagcaaatcgaactgactgcagagaaccaattgacacctggcgatgtgaaactgacgaaagtggacagcaacaataaaaaggctgttttaaaaggagccgaattcaaactgctcgatgccgatggaaagccagttaaagccggaggcaacagcaaaaagctgccggcagtctggactacagaccaaaacgggcagttcacagcggagggattggcacctggacgctatcaatttgtcgaaacgaaggctcctgacggttacaagctggatgaaacaccgattccttttgaaattaaaaaaggacagacaaaaccggtcgaggtgatcgcgtccaatgaaaaactgaaaacgccggctgttgataaaggcgcaccggacccgaattcgggagaccctaaaacagataacaaaggcacaccggaccgaaattcgaaaggagatcctaaaacaaatgacaacggtcatttgaaagatacgcttccgaaaaccggtgacacagacagcatcattccgatcatgatcggcatcctgctgattctgtctggaggagccttcgctttcttcacaagaaagaaacaaagaaaggcgtaaacgaatcattgaagcacctgatcattgaaccggtcaggtgcttttttaaagaaaggactgtgaggcatgtataaaaaaatgatcgttgccgtgcttgtcatatcaggaatactcttcgtcttgtctcctttcattaaagaaagcatcatcatcaatctcaacaagaataaaaattttgatttgactgctgaacaggcggaacaaaacaatgcacaaaaggcttcatttgattttgaggcgattcagccgccttctattttggaaacaataaaagccagcctcgatcgtgaatcaaaagcggtcatcggccggatcaccataagcagcgtcaatctcaagcttccgatattgaagggcacaaccaatcaaaatcttctttacggagcgacaacaatgcgacccgatcagaaaatgggcgaaggcaactacccgctggcaggccatcatatgaagcgggagagcctcttattcggtccccttctcaacattgaaaaaggagataccgttaaaatcacagactttaaaaaagactatatatacgctgtgacgtcgaaacaattcatttctgaaatggacacagatgtgattcaagagacgaaaaaaaaggaaattacactgattacatgtgacaaagctgtgagaaccgaaggacgccttgctgtcaaaggaaagctgattcatgttgctgtacacagataattgaatgtccgctgcaggcaggcaaaaatactgagggattgccccttggtatttttttattgggactaaaattctatacatcacaaaaaaatgacaaaaagatcactatgaaatgacaagagtaaaaaagtaatgagaaataacaaaaaaagaaaatgaaacgatgcggattggatatttttctttcataccggggttggcggcgattttactcaatgaaaatagataagttttctgaaatttatattgactgaaagcgcttttaaaattatgataatatcagacctaacaaagatgtaccaaaaacataactataacctaacaatttatttaaacggaatagaaatgaaagcgattccaaaatattccgttgcgggtaattggttgcaaggaggcttcagcttccatcaaaataaaatttttaattttctgttaaggaggggttgcttggggcgaaactttcaaaagttagatatgaagcttttaggaaaaagaaatgagctactattaaggatgtttcgaaaacctttggaaataaatcaattttcatttaaacaaaggcgggggaaatcaatatgaatgaacagggaaatcagaaatcatttttgcgtactattattttagtctcgacgttcggcgggcttctattcgggtatgataccggagtaatcaacggagccttgccttatatgtctgaaggagatcagctgaacctgacagcatttacagaaggattggtcgcgagttcgcttctcctgggagccgcattgggagcggtgttcggcggaaggctatccgattatatcggacgccgcaagaacatcatttttctagctgtacttttctttttctcgacgcttggatgtacgcttgcgcctgatgtgacggttatggttatctcacggttcctgctcggagttgccgtaggaggagcatctgttacagtcccgacttacttggctgaaatgtctccttcagaaaaaaggggacgaatggttacccaaaatgaattaatgattgtctccggacagcttttggcatttaccttcaatgccatcctcggaaccacaatgggcgattcctcacatgtttggcgttacatgctggccattgccgcagtcccggctgtattcttgttctttggtatgctgagaatgcccgaaagtccgcgatggcttgtctctaaagggaaaaatgaagcggcgctgggtgttctgaaaagaatccgcaaggaaaaaagggcgcattcggaagttgctgaaatcgaagctgcagtcatgaaagaatcggaaatgaaaaaagcgaattataaggacctggctgttccttgggtgcgccgaatcgtatttcttggaatcggtatcgctgtcgttcagcagattaccggtgtaaactctattatgtattacggaacagaaattcttaaaaatgccgggtttgaaactaaagctgcactcatcggcaatattgcaaacggtgtcatttcagtattggcgacgttcgtggggatttggcttttaggaaaagtgggacgcagaccgatgctgttgaccggtttaataggaacgacatcagctttgctgcttatcggcatcttctcaaacgtccttcaaggttcagctgctcttccttatgtcgtacttacgctgactgtaaccttccttgcattccaacaaggcgccatttctcctgtaacatggctcatgctttctgaaatattcccgcttcgcgtacgcggcctcgggatgggcgtcaccgtgttttgtttgtggatcgccaatttctttgtcggattctcgtttccgatactgcttgaatcgattgggctgtcctcgacattctacatttttgtcggacttggacttctttccattgcattcgtgaaaaaattccttcctgaaacaaaaggcctcacgcttgaacagcttgagcataatttccgcaactataaatcggaaacagcacaaagcggtgcaagcgctaaaatcagcgggtgaccatttgaattgttgagggacatgcaggtcgagtctcaacggcagagcataagagcatatagatgaagcatttgaagtttgcaggcggaaattttcctatagcgaagatttctgcctgcatatttgtatgtatcggaggcgtcttagatatcctaaaagaagatcttgaataaaagcttcattaaatgaccgtgcaaaagtgctgtcgaggttaatggtttatagttcggttcagtatatattgtaatgaagttggggaacattcaataaaacatcacataagatgaaaaggcaagtaaagcgtcatttattatgaatggctgtaagcattattttttcaggggtataaaaaatgaaaaaagtgttgacggatcagttggatgcatgatatattattattcgtcgctgagacaacgaagttacagcttttaaatacagatattatattcatcatttaaagggtgtacaaaaatcttaaaatgtgtataatggataaagtcgaaacaaaaaagacttcattcattcggcagaaaaacttcaaaaaacttcttgactttaactgatattcatagtattatagttaagtcgcctgatgaagcgcccgtagctcaattggatagagcgtttgactacggatcaaaaggttaggggttcgactcctctcgggcgcgccatatattcgcgatgcgggtgtagtttagtggtaaaacctcagccttccaagctgatgtcgtgagttcgattctcatcacccgctccatttttagtaaaataagtgaacgctggctaaatacgccacatcgtgtggcaacgcctgcatgacccacatcctgtgggcctcgtctgcccgttatctagttttgagagaataatttctcaaaaaatgcacttgcattttttcaaatacatagtataatgatctttgtcactaaattgtctggtgatgatggcgaagaggtcacacccgttcccatgccgaacacggaagttaagctcttcagcgccgatggtagttgggggcttccccctgcgagagtaggacatcgccaggcaggcattattccgcagtagctcagtggtagagctatcggctgttaaccgatcggtcgcaggttcgaatcctgcctgcggagccatttattggagagctgtccgagtggtcgaaggagcacgattggaaatcgtgtaggcggccaacgccgtctcaagggttcgaatcccttgctctccgccactttaaatacatctggcccgttggtcaagtggttaagacaccgccctttcacggcggtaacacgggttcgaatcccgtacgggtcaccattcttttttggacagcacgctgaaaagtatcaggtttacaccaaagctttttaaaggaaggcatgctaagatcgcaacgtcctgctgcaacgcatgcacttgtaggtcctgtacttcggaggattagctcagctgggagagcatctgccttacaagcagagggtcggcggttcgatcccgtcatcctccaccatttctatgaaaatcatattatcgcggggtggagcagttcggtagctcgtcgggctcataacccgaaggtcgcaggttcaaatcctgcccccgcaaccaaattactcattaatggtccggtagttcagttggttagaatgcctgcctgtcacgcaggaggtcgcgggttcgagtcccgtccggaccgccatttaaatagaggctcggtagctcagttggtagagcaacggactgaaaatccgtgtgtcggcggttcgattccgtcccgagccaccatttgccggtctagctcaattggtagagcaactgacttgtaatcagtaggttgggggttcaagtcctctggccggcactgttttggaggggtagcgaagtggctaaacgcggcggactgtaaatccgctccctcagggttcggcggttcgaatccgtccccctccaccatgtttttaggggcatagtttaacggtagaacagaggtctccaaaacctccggtgtgggttcgattcctactgcccctgccaattttaattcacaatttatggcggttgtggcgaagtggttaacgcaccagattgtggctctggcactcgtgggttcgattcccatcaatcgcccttaatattgggctatagccaagcggtaaggcaacggactttgactccgtcatgcgctggttcgaatccagctagcccagttttcatctttctttatcatcctgcatatgataagatgaatattagttaaaatgcggaagtagttcagtggtagaacaccaccttgccaaggtgggggtcgcgggttcgaatcccgtcttccgctccaattcttaaatgatggcggcatagccaagtggtaaggcagaggtctgcaaaacctttatccccggttcgaatccgggtgtcgccttatttcccgtgccggggtggtggaattggcagacacacaggacttaaaatcctgcggtaggtgactaccgtgccggttcaagtccggccctcggcaccattgatcacacacatgccggtgtggcggaattggcagacgcgcacgactcaaaatgcggtttaccattccgatgacataaacgctaatatgacgggcgatctacgttttgtaggccgctctttttgcgttatatgcgtaagattccgttgttttgtcgccgacgaataaaattcggaggtgtagcgatggcacgacggtcaaataagttaataaccgatcaagcaacggacaagcccgaaattgaattgacggattttgagacggcgtttaattcgtttatacgagaatgtaagctgaagaatttatcgaaacataccgttaagtattatcgcgatgaattactcgcatttcgtacgatgcttgaacggcagggaatttcgacaaagcccggcgatatgacgctgaaaattattaaggaaaacgttattgtctacatgatggaaacgttaaatcgaaaagagacgtcgattaatacgcggctacgggcgattcgggcgttctttaatttcctcgaaaaagatcgccaaatttacgaaaacccggtacgggaactttcgctcttgaagcagaagaaggaagttgtagaaacgttctcacgcgaccaattaaaggacttactgagacagccggacttagggacgtttactggttttcgcgattatacgatcatgctcttacttattgaaaccggtgtacgggttcgggagttgacggatatttgcgttaaggatattcggtgggaagattcgcaaataaggattgatgggaagggctataaagagcgccttgtaccgatacaagcgacgatgaaacgccaattaaggaagtacgtacaaatacgcggagacgtaccgaacgaggctttgttcgttacgatagataatactccattgacaatccgccaggtacaaaaccgtttaagaaagtatggacgaaaggcaaatattaaaaacgttagatgctcaccccacaccttccggcacacctttgcgaaaatgtctgtccaaaatggagccgacgtctttgcgcttcaggccgttttggggcacacgagtctagatatggttcggaattacgttaatttattcagcagtgatgttatggacgcccacaagaaattcagccccgtagagaaattgttttaacctcgtcttttaaggcggggttatttttttgtctaaaaacggtgccaagtcgaatttacatacgcatctattattgaacgcggaaaaattttcgatattgatgtcccaaaaaagagcacgcttgtggggttatgttaatgaaggaggaaaaagttcgaatcgagtgtcgcaaaaacgaatgctacctacgtgttataaagtgtaaggaggttttcgaatgacaaatgaagttaagacgttcagttatgagcaactagacgagaatacagcgaaatttctcagaaataaagaaaataaaatgcgagaaattgtcggaaaagcgtatacggatttaggacgggagttgaaagaggcgagagatcggcttgccggaagtaatcaatatgacggcatgtttgataaatggtgctccactattggtctaaagaaggatttggtctacaggcttataaacaggtttgagctaatcgcaaattgcgaagaccaaaaacttctcgaagacctccccgtctcattaacgtacgaaatcgcacgcccatccgcagagtcaaccgaacctaagcgccaagctaaacaagcggtcctaaatggcgaagttaaaacgctaaaggagtaccgggaactattggcggagaaagaggcggcagaggcagcgcttaagcaagcggagcaggaggcggatctattgcgcgacaaactcgaacgggctgaagaagccgaaccggaaattcggacggaatacgtcgaagttaaaacgcccgatccggaactgctcgctgaaaatgaacgatataaagaattgttcggtgacatttcgatgtatgaagggcggacaactcgcgtgactaacggagacgcgatcacgtataccgtatacgagttttccgaagatgttcgtaagtttgtggaaaagtacggtcatttgacgcatttctctcgggagtttagcgaaatgattgacgaaggcaaagaagaatataggaaagcgattcatgcgatgcagacgcttatgagatcgattcaaggtgctatggacgaaaaagaaccgatcattataaacggataaaggagcgatttaaatgttgacaatcaaaaacgtaaaagacggcggagtagcttatattttcggagctgaatacgcaggagttgcgaaggcaatgttccctcgattcgctgagaagttgttgggcggcgaagaaaatgcggcattgccggaaccaaagaaacaacgcacgctggccgatgtcaagaacgccgtagataaaccgcaatctgatactcgtctatgccgttcgtcaaaattgacagggaaggctcttcatcgagagatttcacaagtaatgtttcgcgcagagactttattcggtcttagtagaagaaaggtatggggcgagctgtacgaaaagcttcgtcaagaaacaggcgtagatcctaaaaacgtcaaaagaagcacaacgaaagggatacagggaggtccttcaaaattaagcacatatttaaaagacggttacggtcagcgcttagtagaaatcgcctatgaaatctacgacagatatgaggcgagatcatgacaaacgaacatcaacgactcgtctcagtcgaatcgcagtccgaatataatctaacttccggcaagtccgaaacacgcatcttcgttaaaatgtacgtcgatgctgttaagaaagggctaatcgcggacatcggagccgatcgttggcagacgttatgcgtcctctcgtcgttcatgaacgaaaaggggaatgttacccgacgcaggatcagatcgctaaggcgctgaatgtacggagagaggccgcaaacaaacgtattaaggctctttgtgattatcgttggcaagggcgtccgctagtcgtaaagcagaagacgagagacccgaaaacgcagcgatgggaaaacacgcgatacacgatcatgccgatcagccagcttgcgatttttgacggggacacggaggagttgccggagccacgtgacgagtaaccacacacggctgagccatatatggctagacaacacactaacaagaaccatcttttaactagagccattaagaactagataaataatagcgctcatatacattcgcgcggatattattaataaaagatatatcgcgataaaggaacatctgcaaagagagagcgtatgcgaacgattgctaggtcttattaataaacggaagggattgcgaaagtatgaacgataagacgattctcaagggtatgatcgaaatttatcaaaacgaatttatgtgcggatacgacggacctgataaggatgagctgcgtattatcttcttagagctaatcgtacacgctacgcaatatattaacgactttaggtactgtagtgacccgaaatgcccgtgcagtccggagtttggtatcggaaagctaatgcggaatcacgggcagaaaataaactcggtgctgttcggtggtgcgttcggactgagcgaagttccgatgcgacctattcgcgactttctcaatcaatttatcaacgaaggagatgacgaaactcatgacgattaacatcacgctatcccccgattacaaactcacgtcagacgaacgcaatatcatcgtcaatgaacgctatttcaccgatccaacgaaagcgccgaactggccgaagcggcttgccgaaaatcccgaccttgatccgtcaccaatcgcacgttggcgggaggtcgcgtacttctcatcgattgaccgcgcaatcatgttcgtcatggatcggcggattaaattatcggacgccaagacgctggaagagctcgcacgaattatacgggaatttcgcggggaattagcggctttgctgacggtcgagggtattcgtaagggataacgttaaaacgacggagaggaggcgaaaacgtggcggaggatacgagacgaatctcggagctcaccgacaaacagcgtttgaaattagccgagattgcggaggaaaacaccaaacgaagcgaggaaggtctgacggttatcaaaaaagacgatgagtggaggcgttaaaatgatcgttccaaaattcgatatagaccacattatcaaggtcgcaaaggaactcggcattgaggtgcgggaggttgctccgggagagggcggcgtttttatcaaggaggaagacggatcagagcgtgagttgacgacgttcgatctgtttccggaaactaaagaaatcgcagacctgcgttgtgccgttgccgggttgattgcggaaaacgagcggctgaagaaggcgctgaagttaatccaatcgaagtcggagcttcccgaagaaccagtcgatttagttccgattactgagctatacgaaataaatttacacgcaaaggaggcgctaaaatgacagacgaaatcacaggcctgcgctgtactgtagcaaaattaattgcggaaaacgagcggctgaaacacacgattgaggaagcggaggaacttacggccgacctctacgtcaggtcagagtggcagccttcagagccgggcgtgatttcgatgaaacttccggataatctttcggctgatcagcggcataccatcaccgcattgcacggactgctaatgagcgaattaaaggagggcgaacgatgaacgttacaattacgatgattgacgacgagattcggaaaatactccgggatcactttgcgcaaaaaggatttaacgtcaagggttcgcagatatattcggacgacaacggcattgttcgtttcgatatacaactgtatgcgtacgatattctcgcgaaggaggacgaatagatgagcgaagttaaaaagccggtaattacgaaggagcaggcggaagcgttagatcttatgcgcaaagcgaattacgatgaatacatcctaatggcggcttgcgatggaatactcggcggtgagcttgaagatctcgacatcatgacgctcgcggccgcattaatcaacggatatgaagtcgaaaagacgccggaggagaaggtgcgggagttttacgaatctcacggaggttcacctagcgcagaggaacggaaagcggccattcgcgaaacattatacaaactaggaatcaaaatcgaaggagtgaatgcgtaatgacaaaagacgatatcgaagcgatccgtcagcgtgtagaagcggcaacggggggatattggggcgcagatgatcatgaatggccgggaaacgaaaatcttcggtattgggtaaacacacattgggacggcgttgcggcggcagtaacgaaagaagacgcagagttcatcgcgcacgcccggcaagatattccggctttgctcgaccacattgcggagcttacgtcagagatagcgagaatgtgtccgattgccgaccgacccgttattgaatcgttgttagcggaaaaggatcacatggcgaaggaaatttcggacttgcgtcgtaaaatcgacctctacgaatcctatgcgcaagaatacgattattatgcgattcttaacgaaatgggtgacgaaaatgccgacgacagataaaccgttatccaagtggaatgtgcgcgactttcaatcgtatttaaaggcggagcatgagcggctttacggcgtcccttacgttccgatgcctactcgcgaaccatggaaggccgaagcgggaatgctcgggcgctgggtcggaacgaaacggaagccaggcgaatacgggccggaaataacgaagcgattcatcgatctgtgctttgcggaatacaggcctacggcagaatggccgggtatcagcttcggatttatgcagacgtatatgggacggaatttgcagcgggcagtggcggaaatcagggccgaagcagcggcgcaacaaaggcgggagcagcaggcggaaatcggcgacgacttttattaaacggagggattgcgaaatggaaaacgttgaacaacgatatgacattgcggtagaaacagcgcgagatgcgatcgaggaattgcggctagctgcatacgcaaaaggatacgaagatgcgaggcgtgaattaatggcgcaggcaccggttgaaaagaccgcacaagaacgccgggatgaaatcgttgagcgagcgaaggcggacgttgaacgtcttaggacgaataatagattgtggcggactttcgatattacgttcgatatcaaccgtgaaagtcgaaccgtagaggcggtcgcaaagaaaccgaatagcaggactgcgttttatggaacggcaatatgtgcgccggacgactgctttaacatccatatcggagaagccatcgctctccatcgcgcacttggactcgaagtacctgacgaatatcttaacgcaccgcagccgactgaggttcgtgtgggagatgttgtcggtagtttcgaaattaatgaggttgcggattattacgggaaaatcgtgaatgtaagcgaagacaaggttttttatgaggatggattattcgactatttacctacagtaacggaagggattgatgaatacggagaagagtcgttcttaaaaatcatcgacgacagccggacgggggtgggcgaatgacatacgatccagcaagagtaacgactgatctcgatttcgtcgaaggtatgctacacgtcgtaaaaggggatgagtacaccgtatatctcctcgtagacaaacacaacggaaatatccacgtagtaaacgtaatcgagaactaacgaaaggagtgaacgccattgactaacgaaagaaactgcgtcctggctaccggatgcaaagcggccggcacgtccgcctgtaaccgccgatgcccgcacttcatcgcactacacggcgcgacaggaaacggcgggcggtcagcggcggcaggcttaccgcgagaatatcgactgacaacgcttgccaattcgccagccagagcggatcagccagcgatatataaatcggttgaaaactacgtcaagacgttcgagcgtcagtttgagcagacggaaggctacatcgaaccggctgaccgtatcaagtcgttgtatctcttcagcgcgaactctggcaccggaaagacgacgacagcggcggcaatccttaacgaatggctgcgcgtctattacagcggatctttgcggagaggtttaacgccgtcactgcgtccggcctatttcctcgatgtgaacgaatggcagacggaattcaacctcgcaaccatgacgaacgacgaggacggcatgacggaattcaaacggaagatgacgctggcgatgacggctccctttgcagtactggatgacgtaggggtgcgggattgtacgccggcatttcgcggctatcttcacgcaatagttaacgcaagagtgacgaatcagttaccgactgtctacacgagcaacattgcgatcgaacggctgccggacgttttcggagagcaacgtctgacggaccgtattcgtgacctatgccgcgtgattgaattcgaaggcgaatcgaaaagggggctgcggagatgattaaagtgattattgccggcggacgcgatttcaataactacgaattattgcgccaaaagatggactcagttttgcgaaatagacaggacgaagaaattataatcgtttccggaaaggcaaggggagccgatgctctcggagaaagatacgctgacgaacgcggatatagggtaagtgagcacccggccgattgggatagattcggaaaggctgcgggatatattcgtaataaggagatggcgaaagaagctgacgcactcgtggcgttttgggacgggaagagccgaggaactaagcatatgatcgatctcgcaagggagcatgggttaaaaatatcgatcgtttattacgggagtggtcgatcatgaaagccgaaatcactatcggagatctggtcgcagtagacggatatcctgatcgcatattcttcgtagaagcgcgccgagacgttaagaaaacggatgataccggcgtctctgcctacgttgagttcgatctgactgacgcaatccacggcgaatggattttcgccgacgcgaactatatccgcctagtctgccgcagtcagtttgttgacgaatatcttgacggagttgattacgaaaactatccggagccggagggaacggcgattcattgggcggaatatcttccggaattgccgagcattaaactggcgtctgcgattagcgaaggactagaaaaggcggggagtgaaatggcgaaaaagaaaacgaagaaaatcgatgagctgctcgacgagttaaacgattacaaacgtctggaagcgatgtacggcgacgaggaatacaaggcgaagcaggacgaagctaaggcgaaattgaagcgggaggtcgagcgataatgtactgcctactctatccgttaaagtggatgtttgctgcgcttgattgggcgttctattacatcggagttgctgcggacttcatttcgggaatgttcgagagcgcagccgactacttccgcattcgaattgaaatcgcagagcaggcgaaaaggggcgtacgagtcatttacgttaagagagtgaggagggatcgcggatgaactacggtgttttaatgctatcgaaagtgatcgagcagaacgatccgaacgcgctgctgcgctttaatattaccgccgaggacttaccaacggaaggcgaacgcaaagcactccgatacatcacggaatacgcggagaaacacgggggccaggcgccaacggccgagatggtggcgaatgaggttccggacttccagccggattttaatatcgatgccaattacgattaccttgcggaaaaactacggaaacaggctgcgttgcgagagttcgtcgatattgcggaaaaggagcttccggaacggtttagccaagcgcaagataatccggaagaattattttcgtggttgacggaaaaagtcgaaagtcttaaaataagaacaaacgttcgtagttcggttggcaccgacatcaaaaaagatatcgacaaatttaaagccgaatacgaaaaccgcaaggctggcgagtctttccggatctggcgcagcaaattcgaattcataaaccgggcgatgggcggctatgtttcgtcgaacgtatacgttatttatggtaaatccggacggggaaaatcggccatagcgttggaggaagcgattaattgcgcgatgcagggggcgaacgttctaatctggtcgatggaaatgggatggtacgaggttctcgtcaggctttacgtttccatttcggcaagcattggcgtgacaaaagcgaatcttgatggcgtcgatattgaggccggatttaattcgcgggatgttcgccagggaaagctacccgacgaattcgaatccggctttatggagttcctcgataagatgaacgaattgattccgggcaacatcattgtccgcgcggtagacgacgaggacttcgactcccggaaactccgcgatctgaaggcggatatactcgaaacgaaagctgacgtcgttctaatcgatccgttttactacctcgattacgaaaagaacacgtcaaagactgcggggggagacgcggctaatacatcgatgaaactccgtcgtctggccggccaaacaaaaacgactgtctttgcgttgacgcaagcagaagaaggtgaagggaaagacgctgactctgaattaaaactaccgcagcgtaaggacgtcaagaaaacgaaggcgttgctcgaagatgctgcgttattgattgcggtggatacgaacgcagaggaagggcgaggcctgatcggtctgaacaaaggccgtgatggcggcgaagggaagagcgctgagatcgtttatctgccgcagtttggcgtcatcaaacaactaggaggagccgaagggtcagcggatcagttcgacttttaaggagttggaatataacggataacattgtcaacatttaccgtgattctttcgacaaaatacgatggaatttttcgaaaacagggcgtaatatatagaacaatccggcctaattagggcgaaaggagtgggactaaagtgccgacattgacgttaaacggccgtccggtcgacgtcgacatacgatatgagctcgaacagttcgaatggacgcggccgacctggacggacgagcgactcctggccgcaagtcctttccgttatgaccgaatgcctagcttttacgtttatctcgaagacacggcgaccgcaaaggccggttattggggcgatagcggctattatgacgcagagtatgcgcggggcgggttcgttaagcttctggcattcttgcgcgaagaaaccgaagaggagacgatcgaatacttgatcgatgcgtatgcgccggaatcagatgacggaaaactcacgctcaggctgccgaagctgaagctcgcaaagactcgcgaaccgttgagggaatcgattcttgacgacgtggctgcggggcctaacgattatttaaacaagcgcggaatcatgccggctgtccagcggctaatgggcgtcggtatggctggcggtgcggttgcgttgccctggcggcttccaaacggccggctcgctaacgtaaagaatcggtcaacgcggggcaaggcgttctggtacgtcaaaggcggctggcctattcgggaccttgtttacggaatgaatgtcgtgtatgatcggcggctgacgcgcgttgtcctatgcgaggcggagatcgatgcgcaatcgtggatgacggcgggagtgccggcgatcgggaccggtggctcttcgtttaaccaacggaaggcggacattatcgtccagtctccgatcgaacacgtaaccatcgtgacggataacgataaggccggcgagaagttgcgggcggaggtcgaacgttatttatacgggaaagtcggactggcacacggatatattacggaaggaaaggatgcgaatgaattcttgcttgcgaaggggagagcggagttgaaggcggtgtatgagcgtgcagaggacgttaagaggtggcgggtgaagttacctaaacgggtaagtttttcgttgacgggcgacacttaatcccgtcagcgaccgactaccggttattcctcgacgatccattcgtacaggtcgtccatgcggcagtttagaattaccgaaaaagttttcgcagtatccaggttcatccgttttgttccgtgtacataaccggatacgtgcgattcttcaacgccagccctatcggcgagctgcgcctggttcattccagcttcacggagtcggtcgcgaagtaaacatttacctcgacgatacttaaccgtaataaacacctccgcaaagcttttgctttacggggaaattatagcttaaatatcgttatttttctacgttatcaggaactattttaatgaccttctcaataggtactcctaaataaagacatatggtttcaatcgttgctaagctaacatgcttatcgtcattaattttagtcaccaagttgcgatggattaccttgtcccttagtattccagttgtttgtccacgttcttttaggtatgacctcagaggctcataactaatcataaaaaaatctcctttttctaaaattttacgcacacaaaagtgtgcacttgtagtatactatagatataacaaaacgtaaatcacataaaaggggtgtcggggttgcgttctataagagatgagttcacctatcaaagagagtctctggggttaagtataccatgtatttccttagaaacaggtattaatcgggattgtttatatgatttagaaaatgaagacagaatagggtttagacagcttgttaagttagcgaggtatttctttaaagaagaatatcacgaaaaaatgcgtgactggtgtttgcaattaaatacaacggaatccataaaacaggcttttgaatattcggccataaaaagagacgcgaatctgttgagccgtcttattaccgaaaataaaaaagatccttaccttaaatcttatattaacgcttattctattatcctcgatttcatgactgatgagatatcatttaaagagatgatttcgaaaattgagaacctcaagacttccgggtgtaaagagatctctatcttgaagcaaatatatcagtgtgtctctatgtactatacgaaagattatttcgagattaccaaggaggctgaacgaattagtcgtgagttatccgggatgaagagcgttagaaagatgttctttaaagagtgctacgcttaccgattgtctgaagttcttgcgccagcataccttcaccttaatgaacttgatctttgtcgccaccatgcaaatgttatgataaaaacacaattaaatgataagcacgagtcagatggttattactaccttggaatctcccatttagctgaaaaccaagaggagcattgtttatattttcttagaaaaagtgttgaagctgcgaggaagacaggagagaggctaattattaatgaggccgaacataatttaacactcgcggagatttatttccacttcaaaaggagtggggatattccaaatacatctttattaagtaatcagatgcttttaggaggtgatgacgattttatcgtatttttcgattacgtaaaagctcagtctgtagataagatttatagagggtatgggcacttttttaaaaaaatgaactttttcttcgcatcactaatagcggacgtattgccttcccttggaatcgacaaaagacaagcatcagaactcaaatcatttaaattcgaaaaaaaaggagaggttttatatgaagaaagttttattgatgggattagttttaggggcgattcttgcagttttgcctcataatgcggcggcaacagataaacaacagggcaatgaagatgtaaaagtcgcaggcataaaagtaggaggataatgtatatccgtcgccaccaaacggtggctttttttaatataaaacttagaaaattgggtaaaaaatagtttttttgagttcacccaatttcgaacatcaacaaagactaatatgctaagattttcatatagaggacaaaacaacaaaaagatgaaaaattttttgttgttttgtcgcaaaaactgatagtccctacgtgttatatagtgtagggcaacaaggaggtattttaaattgaaagagaaacaattcaatagaataaaggcggccttaaaaagtggttcagcgccttatgtaactcgcgagtcagaaagaatcgctcacttaatcccggacttaacctcttttgaacaagagtgttactggcggatagggaaagccctaatgatttttgagaacaatggacgtgataaaagggcgttgatccaaaaaatcattagagatgtgagaactgattttttaagcgggaaaaagcgcaaattaaagaacgacgtcgctattgaggagttaaacaaggatggaacagtttgggaacccgaagacgttttggcgaacgtcgtaggcaaggttttattaaaagagaaggtcgccctgttggcgcaggacgacccaagaaaaaaacttatcatagaagcttggattcgcggatgtacgaatgataccgacatctccacgttgttggcgcaacgttttggaggaaatgctcgatcacattgcagattcatccaacgattccgatcacgctgccaaacccaactaacagcataaaggtttctttctgaaacgtaactagcccggaaggcatcgctacaccctcatcatatacaatctgttgtcaaaagacaagcgaacagtatgcgaacacaccttccgaactagtacgttttacctaaataatatggaggcgaacgtactatgaatatccccgaaattaccgattccaatacgtatcctgcgctagatccgcgcaaactaaccgaaattttatatcaaggcgcatggccagccgacgaagatccggcggactactaccgtccactttcgatccaggcggtgagggtcggatgaaagcgacgttatcccaccacgcgaagaaacgaattacccaacggtttaagatcggaaagcaaacgccggaagcatgggcgtctcagatgttatctaatgcgatttactgcggcatcggtccggacgacaatggagaagatgctcggatttattcccatcgtggagcaacgttcatgcttgcggtagatgcagacgttgttaagaccgtgatcccaccgaataaaggctgcatcaatcgtattcggcgtaaggtgacgaacttcattgcggaagaaattgcgaaaatgtcgcaacaaattacggaagaggtggctaggatcgataagtttcgcgatgaactcgaagaagagatcgcacatttagaagaccgtttgtcgcgcgcccggtcattgccgactaaattggcgttgcaggcccgaattaatgcggttcgtatgcgtatggacgaattaccggcggaatcgcacgaaataagacgcgaactgacgcgtacagcgagaggagtcgccgcctatgtctaacgcatggctattcgaaatatttgcggtgattgcaacgctttgtatttgcagacttatttacgaagttaatcgcgaagaaggcgaatgagggcggcggacatcgcggcccggcgctcggagaatgtcggggcggccgttaagtaacggagtcgcgtcgctacggcttagcgctggcggcgtttcggacgcaggtaccggcattttgcgagggcgaaaagcctcaaaattaaaacgtagggggaaatcgaatgagtcaatttcaaaaaggcgcggcggcgctatcagcattacaggccggtggaggtgaaggtggcaacttaaataagatcgatttcgctaagtttggtgttggtactacgtataaagtccgtgtgcttggagccgaggacttaatgcagtactacggctacggcatctacaaaaaggttaatacgtttgtcgctaggaacccttctaccaggaacgaaaaagggtacgttgtgagcgatcatacaccatgggacttggccgaaaaatactaccgcgatctccaatttaaagcaaaagaggccggtgatgaggatgaagcgaaggctcatggtgaagaggcgtggaagtactgtggaaaagagcggtactctatgggattcatcgatctagagtccggcaaagaaatcatcgttgacttgagtcgaaatcaagctcaagacgtctacgcgacgattaagaaatacgaaaaaaaactcggaaagctcgcctttgagttaacgaaaaccaatacgacaggtaagtcgaaagacacgaaagtttcccttactccgttgatcgatttcgaagaagatctcaccgaacaggagcgcgcaaacttcgctaaattcgacggtaaggaattcaacgcaaaactgttcgacggcctgctattcgaagctgacgagaagacgcagatcgaaaacctagtcgcagcaggattcgatattagtctgatcggattatcgctgggggccggatcggataacgaaaaagataacgaagaagtcgacgaagaaactttaccgttttaataaaacgaagggggacgattgaatggcgcatctaaccgaagttgtcggaaaatactcggaggttgtcgcagagttggcgctgttagcgaatgggtacgcagtatcgcgcccccaactcgcgcagccttacgatttcaaggcggaagacccgctgaatggtcgcgaatacaaggttcaggtcaaaacgtttcgacgtaggcctgaccgcaaaaatgaactcgttctatacgcaacgaacggaaaaggcgagccttacgatcggtccgacgttgattattttatcggcgtattgggtgatccgggcgaaatgcctcgcgtttggatgtttgaaaacgaaggaaatcagcgcgaatattgggcgaaatcaactaatcgtgcgagcaagcggtgggtagaactgccgctgtcccttaaccgggaactttacgaagttaaaaacgaagcggaggcggtatgatggcgaaacatttattaggttacattgtaggcaaggggtggatttagtgaaatcgtatctaataaaagtgaacggttcttattatgcaggagaacatgaagatacaacgcctacccctcgaccaagtgatggttggtgcaccagcagaggagaatcaaatgtcatattcttcatgacggatagaggagaagcaaaaatttgtgagggtttgactaacttaaatagccattggcaacgaatatataacgctatgagatatgacggattagacgttaaatcaattgtaattgaggaggtttagtaaaaggtgattacacatatcacaatcacttagattattggaattatttcaacgtttcggaatttccgaatagtccagagtgggatggtcataagccagaagatataactcgtttattaactttggtaggtgaaaaatgatgacgaagaagaaaaaattaatgcttccgatgtattgtaataaatgcggtaaagaacctcaaaaagaaaagaaagacggttggaatgtaatgaaattagattgtccatgtggaggaagagtagtaatggattacacaaaaccgtactacgagtagtattacattccagaaataaacaccataagccacactgatagttcaccaatgcttatacagagagtgttaataacattattaaagcagttgaaaaggaaggaaaggggtactcatttgacgtgttaagagcaaaggttttatacggtacagaagcaacaattaagaagcctaagtacacagaagtagaggatgcgcacggtaatgcgcttattgcgggttctgtgttccgcaaagtctccgcatcccagccgtcaatagaagatcgcgtcagcacaaacgaaaaggatatagaggcattaaaatccgacgttgatgcactaaaaggcgaacctgaggctgggtacgtacggattgccaagagcgaggcgaaagcgggcgatttcgttaagtttgacgaagctccgagcagatatctaaccgcagggaagtattacgagattgagttcgtagatgattatggggatccgatcatcatagatgacgacggatacgatcttgatacccatggagaagtattcgaagtctaccgtaaagttagcgccgccgagccgaagcctgaacgcctgaaagtcggtgattatgcgaaggtggtcggtactgcacggaacggctgctgtgaccgaggggatatcgtcaaaattacagaagacgatgattcggcggttccgttcaagcttgcttttgtcaacggggagtatgccggatgggaagacgaaaagtccctcgttcgcgccaccgacgaagaggttgccgaagctaaacgaaagcaggccgaagtgaaagagtgtaagagatgggccgcaatcggacgcgaggttggcgagtataaggtcggtgatattgttcagtatttatatgatggggaaatttgcgaggttgtggctgtcggcgaggacggtcgcgtaaaagtcgctactcagaaccacggaaattgcacagaaaatcagtcaagcatcgaactaatagcgccagtcgaagcgcgtttcgatcgaaagggcgacgagtaagtggccgccatctgcgccgaatgtaaccgggtaataaacgaagggcagtccgtaacctacgattcgctcttcgaccggtacttttgtgacaacgcttgctggtcggattggtatgcggataacgaggcggaatacaagcggaagtacgtaagccgcgaagatttataacgtcgtaagcggaaggaggatgcgaatggaactcggtaatctacggttgaatcttagcgctttgacgcctaaaaatgacgaagttaagaacgaaaaagttgccgaaacagccaagcggaagaagaaggcgaaaacggccgaaccgatcgaggagagctggcgtcgcatattcgcaagcaagctttcggaaacagaccgtcaacgattaaacgaagtcaaggcggcaatggacgcgggcaaactcgccaggaacccgtctgactgcgtgaacaaggccggaaacccgaaggcgttcagcaaggcggaggccctgcgattatggaagacgcttcaagaatcccagcgagaagaaaccttacggaagatggtcgagaatacaccggaaaactactggctgattacggacgaagcgcggctagacgaattcctcgcgatgcttgctgacgaagaagagatcgtattcgacgttgagacaacaggtacagacgtatggaacgactgcattgtcggccatgtgctaacggctatcaaagcggacatccacgcgtatatcccgacgaaacataatacggatcatccgcaattgggtaacggctttgtcgtcgaaaaactgcggccattttacgaagatgagtcgatcggaaagctcgctcataacgcaaagttcgatattcacatgcttgatcgcgaagggattacattgcgtggccttacgtgggacacacaggaagcgatgcggttgcttaacgaaaacgagccgtcctttgcgctgaaaaatctcgtcacgaaatatctgcggattaaatctgacacatacgaagacttattcggaaagatcggctttaacgaagtgagtgatcttcggattgcgcttgcgtatgcggcaaaagacggtgatgtgacgagaaagcttcgcgatttccaacgcgaacacctgaagaagtttcctgatatccttcgctactatgagacggtcgaggttccgttaatcagcgtcgtgcagaagcttgagtcaaccggattcgacatcgacctggaattcgcggaggaatacggtaaggagatcaaaacggagatcgatcgtttgtatgcggagattatcgacgagttgggcgacatcaacattaactcgccggcgcagcttaagccagcgttagaagaagcaaccggagagaagctcgactcaactgacgcaaaaaaagtcctaaaacctcttgcgagcaaacatccgatcattaagaagctgctcgagtataaggagaagttcaaactgtactcaacgtacatcaacgctttgccggaattaatcgacaagaggaccggcaaactctacacgaatttcaatcagaacggtgcaaagaccggtcggttctcatcaggtggaacaggcgtaaacctacagaaccaaccgaaagaagcccggaagatgttcgtagctcctaaaggatacgcgatattaggcggagactggagtcagcaagaataccgatgcctggcgtacttctcgcaagatccgaagctagtcgataactacttgcaaggtaacgatttgtacgcgtcaatcgcttcggaggttttcaataagccgatcgaagaatgcggcgatggatcagtataccggaaacaggcgaaggtcatcatgcttgcggttgcttacgggggtggcgcgaacatgctcaaggacgctatcggaatatcgaagaaagaagcgcagaagttcctcgacaacttcttcgaaaggtttccggtcgtcaaaaagtgggtcgaaacgaatcaatctttcgttaagaagcacggatatgtttggatggatcgcggccaacgtaagagacggttaccggacgcaaaggaccggaacgccaaaggccattactcggctgtttatacacagtcaactaacgcaagagttcaggggtcagcagcgatacagaccaaagcgacgatgattgcgctgcaagagttatgtgacaggaaaacggctgaaggacgcggagaatggcggatatggtgcgtggtgcatgatgaagcgctgcttttagttccggacaccatcacgcgagaagacgttaaagatttcgaggatgtcatgctgaatacgtacgttttcggcaacattccgaacaagaccgatatcgagatttgccgaagatggggaaacggtttctcggtggatgaatggttcaaaacgaagggagacgattaattgacgaatttaaacggaaggtcagccgcaaattcactgcgggcacatataaaagaaccgaccacatacgcgcagcagattgcggacgaattggtcgaatatctaaacgaatggcactcgctgccggagacgtgggataacgccctggacgcgcagattcataaatggtacgccaatgctccgaaagtctttccgaagaagccgtatttctcgccgtcatctgctaacgcttgccctcgcgagctttatcacaaggcgatcggatctccgagagacgaaacgaaaaagcctccgtatcaagggcgatggactcgcatcggtacggcgatcggggacgtaatccagcgcgacattctcttcatggaaaaacacttcgagaagaaggccggccgcccctgtccgttcagcttcgaaaagaacgaagacggcacgccaatgttcgaggatttcgcgaaaatgaatcatccggtcacacatcgcggatactcgttcaacctttacggaacatgcgacggcatcatgcgctatgtaacggaagacggcgaagtgttgcgagtcggcctcgaaatcaagtcgaagcaaacgaccgccgcaaagacgtccctccattcgatgcgacaaccggaagaaaagcacgtcaaacaatgtgtcgcttacggtccgatgtacggcgtcgacttatacgtcatcctttacgtgaacgcggctaaaaagtcgtgggtgtatccggaaggggaattcgaaaagtctccggatatgcgggcgttcggcatcgaaattacggaagaagacgtgacggaattattcgatagattcgtagaaattcgcaagtctgtcgaagaaggagcgcccttaccgttggacctgaacggatggacatttaacggatacaagacggctattgcgaagtcgctgacggacgaagaactggcggagcttcgcgcaaaagtgtcgcgagtattgaggtcgaacgtatacgaatctacgaaacggcagtacgttgatgcgctcgaatttatcgaaagagtgcgggcagatgagtagcgccaagcctatccggtgccttgcgttcgacacgtcgatgacctgcccaggcgtggcgatcatcgaggtacgcaaccgaaagccaacgatcaaagcgctatcgcacgtcaagccaaaccctagccggtcacacgcgcatcgagccgaagttatcgaagggtgggcgctgatgttcctcgataaaaactacccgcgagatggattcgactatgtggtacgggaggacttcgcaggcaaaacgtcgacctcgaactatccggttctggcggcgtggaacgcgtgcgaacgagcaacgtcgcgattcgggttaacgttcgataagtattggaagactccaaccgcaaagcaaccgcaactcggaatatcagcaacgcgtgttaagtcgttggttgccggatcaggcaacgcagaaaaggacgaagttgaggcggcggtgcggcgtatgactggatataccggcgagttcgctaatttcgacgagagcgatgcggctgcgatcggacttgcgtggctgattcatgttggcgtaatagataaaccgaaggagtgattcgaatggataaagcgatggagtatatcgacaagctggcagcaaagctcggagtcgcggccgagcatgtatacggagttctcgtaaagcaggcgtttgctaacggtgtgactgattcgattatcgggttcgtttttctaatgatcgcagttattgcgggagtcataattacgaaggtgactgtaaaatcgtatgagaagagccattgtagttgggattacgaatggtttcccgtggtgcttgctgtcggtctggtagtgattcttcccggaggaattggtatttatgtaatcactgaaggcatcaaggcgctaatcaatccggaatactacgcgattaaagaaatcctcgacacgatcggagggaagtgatcgatggaagagcatagaaacatgatgattcttaaacaggagatatttgatagctttatttattcggcggttgcattaactcgccaaattcaagccaagcaaggtaaagaagatgaaataataacgcaggaagaggccgactttgtcaatgcgtttcttgtatacgctaaggaactagcagacacattgcacgaacgatacaaggatgaattaggaggcggttcggatgtttaagcagcggcttatcggagcattagcgtacttgattgcgctcaccttattactcggactgttttctgcaggatgtctgacaggctacgtcatcgtgacggcgctactatcggtcccggaggtcggcgcaatcgttaaagtcggaattacaattgcagtggttttcatggtaaccgcgttactcgtcggattagctgaccgactgtacactgcttaccgcgaacataaacgcgttcaaaaggacgtagaggaggaaacgcaatgacatacgaatgctacggcgtcccggccgcacagttgcgacagtccttgcgatggcttgacgaacagcttaccgatgttgattacgcaatcagtcggcatgaacggaagagggtcgagttggaaatcgaacgtgaccggattctggcgcgaaaagacgagatcgaggcggaactaaaacggaaggagtcgatcgaatgacatacgttgcgatagcgtgcctattactttttacgctgctagcactcgtagaggaaacgaaaacaaaagcggaaagactcgcgaaaattatcgtcctaattatgtacgcaattcctatcggagtgttggtggcgtcgttatgctaatcgcctactactcgctggccggcaacgtacgccgattcgtagccaagaccggtctgcctgctgtcgaaattaaggcggatatgcttttaacggagccgttcgtcttggtaacgggaacttacggcttcggtcaggtcgctggcaccgtttgggacttcctcgcggataatggcgatttaatggcgggcgtggctgcgtcaggcaatcgcaactggggcgggaatttcgcaaaggcggcggacttgattgcggaagagtacggagtgccgatcgtccacaagttcgagctggcggggacgacggaggatgtacggatatttacggaaagggtgagagctattgacgaataagcatgcgaagtatatcgaacttaacaacgaaattatgatacggaagaacggcagctttcaattcgaaaaggatgccgaagccgtccgcagttatttcatagattacgtaaatcagaatacggtctttttccacgatctgcgcgaaaagctcgactatctgatcgagaacgactactacgagcgcgaagtcttcgagccgtacacgttcgacgaaatcaaagcggtctacaaggcggcttatgcgaaaaagttccgattcccttcgttcatgagtgcgttcaaattttacaacgactatgcgctcaagacgaacgataagaaaaagatccttgaacggtacgaagaccggatcgccatctgtgcgctattcttcgcgaaaggagacgcagccaaggcgaccgagtttgcggaaatgatgatccggcaggaatatcaaccggccacaccgacgttcttgaatgccgggaggaagcgacgtggcgaattagtatcgtgtttccttctcgaagtaggcgactcgctgaacgatatcagtcgcgcggtagacatggcgatgcagctatcgaagcttggcggcggcgtttcgttgtctctatcgaaaatcagggcgaaaggtgagtcgatcaagggcgtcgagaattcgacgaagggcgtcgtcggcgtcatgaagctgctcgataacgcgttccgatatgccgatcaaatgggccagcggcagggagccggcgcagcgtatctaaacgtatttcatgcggacattgacgcgttcctggatacgaagaaaataagcgcagatgaagacgtcagggttaagacgctatcgatcggcgttgttattccggataaattcatcgaactggctcgcgaagatcgggacgcgtacgttttctacccgcatacggtctataaggaatacggcgagcatcttgacgaaatggatatcggagaaatgtacgacaagctcgtcgagaatccgaacgtccgcaaagacaagattaatccgcggcagctactcgaaaagcttgcgattctacggtccgaatcgggatatccgtacatcatgttcgaagataacgtcaacgcagctcatgcgctgaatcacatttcgaaagtgaaattttcgaatctctgtagcgaaattcttcaggtatcgcaagtatccgaatacaccgactacggcgaaccggacgcaatcggcctcgacatttcgtgtaatctcggctcgctcaacattgcgaacgtcatggcgaataagtctatcgagaaaacggtgaagctcgcagttgatgcgctgacggtcgtatcagaatcaacgaatatcaagaacgcgccagccgtcgcaagagctaaccgtgagatgcgttcgatcggacttggcgcgatgaatctacacggatatcttgcgcagaataggatcgcttatgaatcggaagaggctcgcgacttcgctaacgtattctttgcgctcgttaattattggtcgctggtgcggtcgatggagcttgcgaaggaaaccggcagcacgttcgagggattcgaaggatcaacgtatgcggacggcagctacttcgataagtacgtcgcgggagattttcgtcctaaaacggagaaggtcgcgaagctgtttgaaggcgttgaaattccggaacgcatcgattgggttcggctggaggataacgtacggaaacacggactctatcattcgtatagactagcgatcgcaccgacgggatctatttcgtatgtgcagtcggctacagcgtcggtcatgccgattatggagcgaatcgaagagcgtacgtacggcaattcgaagacgtattatccgatgccgggactatcgccgcagaattggttcttctataaggaagcgtacgacatggatatgtttaaagtcgtcgatatgattgcgacaattcagcagcatgtcgatcaaggcatttcatttacgctgttcctgaaggatacgatgacgacgcgcgatctgaatcgaattgacctttacgcacatcacaaaggaatcaagacgctgtattatgcgcggactaaagatacggggcaggaaggttgcctgtcatgcgtggtttaaattatcagattgataggaggtggtattgatagtgagcgaaccaactaatttcgttaaggtttactgcgatctcattttgaagaaaatcgcatcgaacatactctctaatcaaaacaagaaaacaaaagccttaaatatagctatgaaaacagccgaaacagggcaacaagtcagaacagcgaggcattggcgagcggtgggagacattgaattttactacgaggaaatccaaaaaggatttcagcaaatgaaggagcttgatgaattaaccgggtggagcgagaacttgcatcaagacaggtttaagttcatgcgagataaatatgaagacatattgaacgaatatttaagcagacgcagctagtaaatccgaaaaataacaaaaagaaggaggacgaataattgacgcaatatacagcggccaactggtcgcaacacgacgacggattcacgcagatgttttacgaacagaacgttaagcagttttggcttccggaagagatttcgctgaatggcgaccttctaacgtggaagtatctcggagccaacgaacaggatacgtatatgaaagtgctcgcgggtctaacgctgctcgacacggagcaagggaacgaaggtatgccgctaattgccgcccaggtatccggccaccaacgtaaagccgtcctaaattttatggcgatgatggaaaacgcagtccatgcgaaatcctattcgaacatcttcatgacgcttgcgccaacggagaaaatcacggaactgttcgaatgggtgaagacgaatcgctacttgcagcggaaagccgaaattattggcgggctgtacaacgcgattgaggcaggcgatgacatttcgttatacaaggcgatggttgcgtcggtatacctcgaaagtttccttttctacagcggcttttattatccgttatattttgccggtcagggaaaattgacgagctcaggcgagattatctcgttaattatccgtgacgaagcgatccacggcgtctatgtcggcttactcgcacaggaaatttacaatagacaagagacggacgtacaactcgaactacgcgacttcgccgtcgaattgcttgcggaactctacgaaaacgagatcgcctacaccgaggatatttacgatcaggtcggactgactcacgacgttaaaaagttcgttcgatacaacggaaacaaggcgttgatgaacatcggctttgatccgtactttgctgatgaaacaccgaacccgattgtaatgaacgggttaagtacaaaaacaaagtcccacgacttcttcagtcaaaagggaaattcttacaaaaaaagctacggtcgaagcgctccaagatgacgatttctacttcgagtaagcgtccatttacgaaagtagatacgcaactattaacgaggaggttttcggatgaacgtaaaaattaaacgcttgtcacccgatgcacaaattccgcaatatgctcacgcttcagacgcctgcttcgacctggttgcggcagaagacgtcgtcatcgagccgggagaaaccgcgctagtcaaaacggggctagcgttcgagattccggaaggctacgaaatgcagattcggccacgctccggcattacgctgaagacgaagcttcgcgttcagctcggtacagttgacgcgggctatcggggagaagtcggagtgattgtcgataatattgcgcaatggatttacgatactaacgaggccggcacactcataaatgtttgccgagggtatgcggaaagtgtgagcggaacattggtcgacataccttacgaaattgtcggtgcgggaacgtacatcatccgcaaaggtgatcgcatcgcccaggccgtaattaagccggtcgagcaggcggcttttacagaagtgactgagttgggcgatagcgatcggggagcgggcggctttgggagtagcggtgtcggaagtccccatccggaatatttcggagagccgatcggaaaggagctgatataatgccgcaaacatacgcatgtttcttgaacggaaaattctatggcgcgggcgacctcgaatatatgaacgaactgtttcgcgattatgttgtcacttccgaaatgtacggagaagacgattgcacttttcggatcacaacaaaagagaaagcgagagaaatagttacgaaatctattaacgaccaataccgaagagttttcgaaagtctagcgaaggaggacgaataaatggcggaaaccaaaatgaacgtacagctaatcgcacatacgcaattaagcgacgaattcaaacagactctcgattatagaaaatacgatgaatctggcgaatattttacgaacaccttggacgatctgcacccaaccgacggccaggtcgtcgccctaaccgcaatcagaacgtgctactcaccgaacaagccgtccgaaattgtcgcaaaggaaggcgccaagtatttcggatccaaagcgtcagatggcggcacaggaacggatgccgaccgactattccgaatgatcgtacgttccggccacacgtcgacactcgaacacctttcgttcacctttgcgattgaaggcgtcagccgggcgttattggcgcaacttacacgccatagagtcggctttagtttcagcgtccagtctcaacgttatgtgcggatgggaagcgatgataagatcggcggattcgattacgtggtccctacgacagtaaccgaagataaaactgtagacatgtacgattttgtatacggagcaccgatggaagatcgcccttcaccggaaatatttgcggaagctatggcgatcgctcaacaaacatacgacaagctccgggaagccggtgttccagccgaagatgctcgcgccgtcctcccgcaatcagccgcaaccaatctcgtaatgactgcgaatctgcggtcgttacttgaattctattcgaaacgtaagccgggaaacggagcgcaaaaggagatcgctgatctagcggaagccctgcgccaggaagtcgttaatgtagagccgtggaccgcgcaattcttcgaggaggtgtaagcatcggtatcctaacgaatttcacgataacagcgcagctattctccggccattgtccggcagatcagccgccagaaccgccaaggataacgccagaacaggccgccatccaatcggctgaatcgcgcaacagagaattaacgaaagagataacgaaaaaggacgcacgcatacaggcgcttgaggacgaaatcaaggcgctgaagaagtcgaagcagatgtccgtaaagagtacaaaagttgaatcgggatggaaaacgttcgaggcctcggcttataccgcattctgttcggaaggctgcaccggcatcaccaaaacgggagtcgacgtcagccattcgatctactacgagggagcacgcgtcatagcggtcgatccgtctgtgattgcgcttggctctacggttgaagtccgactcgctgacggttcgagttttcgggcgaaggcgatcgacacaggcggcatgattaaaggcgcacggctcgatctgttggtcgcgaatgaagcagacgcagtacagttcggccggcagtcggtagaattgcgggttattaaataacgaggaggcggttcgtttggacttccttaaaagcgcgatggatcgggttaagccggaatttgaacgattaatacgaagggagctcggtaaaatgactaaaactaacgaaaaaatccacgtactggctgacgaatcacttggcggaatcaaacgcgaatatgtagaggtcgataggaaggcggaggtcggcgataagattatcgtgacagagggcgatgattttccggtaggtcatatcgatactgtggcgcattggtacgataactacgacgatggatcaattgatttattcgaaggcttcgataatgatattttcttagacggaaatcgcgaagaataccgcgttctcgaaccgaccaatatcgtccacattgacggacctgacggcacggcggagcgctacgaaatggtcgatcgcaaggcggaagtaggcgagaaggttgtcgttgtagatgacgaggactcttcggaggagttcggaaactttcgaattggtgaagtaggtacggttgaaagctacgcaacggatgacacttacttcggtgaatacgctaatgtgcgagtgtcggacggaagggatattccactatatttacatgagtatcgcgtcctcgtcccggtcgaatcctccgaagaagaaccgcaaccatccgacccgatcgacgttatcgctaacctggcgacgcgtgttgcggaattggaacgcgagaataagcgaatccagaaagagctcggatggtatgaagtgggggcgggaagcatcgctaatctacggaatgacgttgcggatattcgccacgatatcgctaagctagaggatagaatcgtacacgattatgctacaaacgaggatgtgaccgattttctatacgaagaagttaagcgtctacaagacgaaatcgacacgctacacaaagacaaccggaggcacggcgaagaattggaggcgctgaaatatgccgcaaaggaagcggacggaaaggtggcgcacctcgaatccgactcagatatgcgcctgttcactgccgaagaggttgccgcacttcttaacgcaatgagggaacgccaatgaagatcgccctcaccgcaccacttcgcgcaggcaagtcgctcgctgcatcgtacatttcgcttcactacgatttccagccgttcgcatttggcgacgaactaaaggacgcatttcaccgcgcattccctcacgttccgagaaatccgaagccgcgcgctcattatcagaagttcggacagtgggcgcgggaagccttcggagaggacgtatggatcgacgctctcatgccgaaaatagccgcctatctcgaccgccatccttgcgactgcggcaatacagcgctaaagaatcgcgtgatcgtcgatgactgccgccagcctaacgaatacaagcgattgaaggacgaaggattcgtatttatccgcataacagcgcccgtcgatctccgcattgaacgcgctaaaaaagccggcgatcaattcgatcttgtcgacttggagcatccgactgagcttgccgttaacagtttcgaagttgattacgaaattgagaacgcaggcaagccggaagagttatacgagaagctggacgcgattatggcggagctactcgtctagctgaaacgcatacgtgcctttcggataggccaggtacggttgttttgacgcctcgccatcgccgatcaagtagaatctctgtggaagatcttggccgtataaattctgttttcggatatatggacgcgctgatgagtaaccacgcggatcaaatttaaacggtcgcacatcgccttctatcgaaacatatccgggcttccctacgattatccttcgctcgtccttatcatacgcaaggaatagtcggaaccccgttttttccggaagctttaaagcacgtcgcgcacccattgacacacagaatctgccgtagttatcgactgtaataaacgctttgagatcgcgaattgtttcgcttgaaatccattcgatcgccatatcgaatctccttacgaaagtatttacgttcagtatagacggaatagttaccgatagtcaacagtagtgtgcggattgttaacgaagttattaacgaaaaaggaggcggttgttatcggaacagtcaaaatcgatctacaccgaaaggatcgcgaatttgaaacgacatatgcgctagacaatgcggagggcgtcaaaacgttgctctccgattatccgaagttcgtcagccgcaaacgactcggagaatacgaagctgccgaagtgctgctcgatctgcacaacgcgattgagcttgcggatctgaccgacagacaacgcgaagctatccggctcgtatatttcgaagacctgacgcaagtcgaggcgggaaaacggatgggggtcggcaaggattccgttaatcatctgataaatcgagcggctgattcgattgcggatatttactactattgggcgggacatggcgaaggatactcgacgggaggacgaattaatggataaggcgctactacacgaaatgatcacggatatgtaccaacgaacgaaatccggagaacttgaccggatcgaacgtattgaggaaattaccgcgctggccgacgcttacttcgatgccgtcggagagcatccggattctatcgcgcttgaacgtatggcgaatctcgtaatctacgaagagctaacgaacccacacccggataaaatggctcgcgaagagtacccgatcatgagcgaaacgcagcgagaagagcgcatcaagtcggaggcatccgaaaagctcgcagaagagtacggggcagatggtcgaaattataaagttccgacgcgaagaaaacgctcttcatacgaggaaaagttcgttgatagatcggccagggcgcgaaataaagaacgaagaagccgctataacgatttcgtaaagggaagatcaccgggacagttcacgatcaatatcgaaaccggcgaaaaaatttctcattaaacccgttacttttacccgtttagctgtctatacgttatgagggcgccctacacgcgctcttttattttgcgaaaaaggagacgatattttgaaaagattactagtagtaaacgcagagacaggcgaggacctatcaacagactatacgctcagacaccggaaccaggacgaagctttccgggaacagcagaaacagacaacggacagacgcgacttttccaacgccaatatgtcttatattcacgaagtctatgacgctctcacaacggcacaatgcgggtatttgatgttgctacaatgctacgtcgactataacggtgttctcgttaaatctagccgcgataaaactccgatgaagacagcggatatgatgtccgttctacagctcacgaaaaagcgtatgacattctacgattttctgaacgcgtgtattcagcacgatattatccgggaagaaggcggcatatactcggtgaacgagcgctaccacttcaaaggtaacttcggtagtcagtacgttgtcaaactctatactgcgaaaattaagaaggtatacagcgaagtgaaggcgacagacatcggactgatttaccggatgctgccgtttatccactacgaaacaaacgctctttgcgccaatcctttcgaaaagaatccgaagcttatccgatggttcaataagaaagagctagcggccgcgatcggagtaacgccggacacgcttggccggcggctgaagcagatgaaattcgatggggagttcgttgtcgcgcgaataaaggtcggcagcgaaccggagcgatatacgttcaatcctaacgtgttttatcgacaatccaaggagccggataagacgctgcttgcgatgtttaacgttaagaaaccgtaaataaacgaaaaagggcgccgtaattggcgcctctaattcgtcttaaacccattcacaaagctttctccgtcctgttccgtatgaataagctgctgagcgctttggctgatccgctgtgcgagcgcctgctgcgctttcccttcgaagctgtagagaagtgatgaatagacgctgttcatttccttttgtatgtcatctactttgaatttcggtctgagggtatttcgaacggattcgagcttggttccggccacgcctctcatacccgttttcagcatagcaagctgcctgcgcttttccattgggccgttctgctttttgattatttgatctaacgtatccatctactcatctcctataactttaaccagtttgcgagcatcttgtcttttgatttgaaatcctttgcgatttgtgcgagataaccgctgatctcctctaaatctgaaatcgtatcctgcaatgacgcgatataggccgcttcggcatcgacatcgtaaaacagcggattcccttttttatcgaacgactgcgccaaatcattcagcgtattgtttacatcatcgagcgtaagctgatcgtataagccgtgaccgacctggcgataggtatcgtatttcaaatcgcttatcgcagcgtcatgttcctggtaggcgttttccgcttctcttttcatcgtacgcaagtcatcgatgatcgcatttactttttgcgcgagctgcttggcaacttcgggtgttactttaattgcgccacttccggaggcaacttccggtgggagcatcgcttttaaatttttgtcataaacgagttcatcgccctctatattttgaacgtttccgtttttgtcgaaggtgaaattattactcccgacccaatgcgtatcaggcattcctaagattgcggtctgaaagaaatacccagcgttttgcccgatttgttggaatacatcgccctgcattctcgcctcgcgcaccgcatttgataattcagggtccttcgtataaattgtcgttccattgtgccggtcatattcgttccaccagccggccccgaccatgtcatccggattgataatcgattttatggaccggtcatattcaccgttgttaattttcttttgctgctcctcagagtgcagcttaacaattgaagggctgttaaacgcgacggcatagatgttgttgttgaccgcgctgtattcagcttctgcgccgccaagcgagtgtccggtagttgaaataaccgtcgaggtgcctttatacttttgtttaacttcccgcaccagatcgtcagcttgcccgatttgggacgttttcgtaattaatttgtagttaccggtgctaagcatcgagtcttgtgacggagttccgttatattttccgagtgttttagaagtatctttcgcatctttttcgactatgtagtgttccttctttttcgggtcaattcccatcacaacgttcccgccgtctgcgtcaataacatcttgaaagaactggcttttcggatcagttcccgcgaaggctacgacgacgttttcgggattatctgatttgacccacttgccgtcttttgttttttgaccctgagaaaaaacaacggcatcaagtcccgtatcagagtctcttttaattttttcgacataccaataagtttttaggtctgtctgtatcggttttcctgttttcaatttatcatctaatctttcgcggttgtaagattcctgacttagcgtataataagttttatctgttatttttggaacttttatcttatcactcatatacatcgcctctttatttttgtaaaataggataggaaagggttgatttccgattgaaaaagaaaaagtacataattatccttattttaataattatagcagttggaggactttttatgaagcatcagcacgatcaaaaggaaaaagagattgctttattcgaagaagcacagaatcatatggaaaaatttttaacaactaactataaagatgtgaaagatatccatttttctgagaattactatattaatccaatgggtggtattactgtgaagggttatactaacggagaaaaagagtttgaaggtctatatgatccagccaataaagaaatattgtcatatacggttgatgccgaacccaaagaagaatgtaaagataagctttgtacaagataaattagcccgctcaaccgagtcgggccttatttgttttatatgctcttcttcataccgcatctgcggcactcacgtaggaaaatgccgtccttcaccgaacttttaaacagcgtataatcgcagttatcgcagcgcccgtaatggacgtctgggtactctttataatcgtatacaatcgtcgtatcatatccttttgtttcgtaatccattcgtctcaacctccgactattaggatacgacaatagtacggtcaattcaacgccattcatgaaacgaaggaatccgcaacaaaccgtttttcgtcttgaaccggtgcttgacgcggcacccaattggctcgatgtaggcgtatttctccgtttcttctacgattagccgctccgcatgaaacttccgccgcgcatcatacggcataaactccataatgccggcatactggccgtccaggtacgaaagaagcagcgcattgtcttccttgcggagtcctgatatcagaacgtcagtatattcgtagttaacgatcttcagccagcgatctgaccgcttattttccgcatacggagcgtttgcctgcttcataacgatgccctcgatcttattttcgcggactaattcgaaataatccgtagcatggccgcgcacgccctcgactattttaacgttaggatgatcgagttttagaccggccagcaattcttttcgttcacttagcggcttagacgtaactgaaacgccatttgttcgcaggacatcaaaaacgcaaaatactatcggatgaaaattcttgcgcgactggaatcgttccatggtggcctcaaaatcgccggctcctgtcggaccaggtacgataagctcgccgtctagtatggtgccgtccggtatgtcgagcgttaatagttccggaaatttagcggtgacttcgttgttgtggcgtgtgtagaggcggattaaaccgttattcctggacgcgatcagacggatgccgtcgaatttggtttccgtgatatagtcgtccgagttaaacggctcctttgcggattcaagcagcatgggcgaaataaacaaaaagaatcacctcgtttcagcgtagttactataatgatatagtaagaggccgccgagacaaagtgatccggttccggtaaattattcctttagctctattttatatcatagaatagctcttccattataatgttaaatagctgagcagactgaatgttttctttgtcttgttggctacttcgtacaacccagatactgtcgcttccttttacttcaatttttacgtatgtatcatcaggttgatctaatctatttgcgataatcttactaccttcgtattttatacttgctgtttttccatctagtattaatgatatctcgttttcatctgtttcagggtcaaaacagactttgctttcagatactttagaaattaaagccctttccatcatctcttggaagttaagcaaatgtctttttattattatgaaaaccttgaatgtgttaatctctatttgatatttatttcgtaaactttcaagcagttgtttcgacttttcgttgtttgccattattaatcactccttttatattttttggattttccgagtttgaaaaactggattatgtgtctgacatggtactctctcctctcgcagtcgaattcctcatgtgtcctactcgtagtatagttatattatagcataattgccttgttaatccttttttgtaaacgaaaattttaccacggaattaaagcgtatgagccgccggaaagtattgcgggtatattagggtatcggcggccgcttaacgcctgatttcgtgtgttattcgataaccttaatcgctttaaatctgctgccattttcgtactgatccttcgtaaaaatcacgctaatccgatcgcctggctttgcgtccgtggctgccggatcgaaagagaagccgccgtcgtccgctgaaaccgcgtagtctttaccttcgacaatttcctgagcgtccttggcttccgctgccatgtcgtcagccacgcgataagcaatatcgacatcttcgtttagtttggcggcgtagattccgagagccgcgttgcctgcgattgataggccgaggatggccgttaagagtttcgttttattcatcgtcattacctccgtatctgtttgcgattaaatagccgagattgaagccgatctgatacgctttgccggcgtcagggcgttgatatagatcgagaagttgatcggcctgctgcggtttcagcggcggtgtgaccgattccccctcgatctaaagaatagaagcgcgataaaaacgacagatgaaccgaggccgacgcagtccaggacggaaagccggccgaagttcatatccgcaatccaggcgagcaagacgacaattaacaaaatttccgtagtatcaattcgtttcattcgtgttataattgattgacaaggggcgaaatgcccctcggtgtttattgtcggcgacggtgcttcttggtcggaggccgtcgctccttactttcggctttggactgatcgtcctttcgcatcttccggagttcaagtccgagcttgataattccgagccaagatgcggtgattgccgaaagcttcattacggtgtcaatcaattacgttcacctcctttcgttactttattatacgatatcgcataacgcatgtcaattggatttgcgaaaatttattcgttatcgtataatcgaattatcaaaacgaggtgagtacggatgaaaataacggtaagaccgcgactgtcggaagtaatgaacgcgaaagggtggaggcaaattccgttgtctgaagcgtcaggagttccgcaaggcagcattagccggttcgataaaaacgaaaggcatctcgattggcacgtatttgcccttgcgagaacactcggagtggatgtcgaagagttattcgaggtgaagatcgaagacgctgacgaatgattggcgtctatttcttcgtgttattatcgtatatttatacgtttatatgaataataatacgatagatatgacggtgagaggtcgggtgattatcggcatattctcaattagaataacgtaattgataatgaacacgatcttattcgtacaaatcggccaaaaacacgactttattcgtacatgcgaaaatggggttcgtgcttacagccgcaagggatacagcgattttgagtgcggaattacttcttagtcttctgaattcgaagactagcgggaactacgtttcactacgtcccgcagaaacgcaatcatgtatattgtataaataattgtatcgcgataaggtcttaataatatccgcggacacggaggagcgtaagcgacggagtgggcgctatgttttaaaacattcgaaaatattccgttaatatatcaacttttacacgcgtagttgtctatacgttatgagaaggacgctacaactacggagcaacaacgggcactagccgcacattggcgtccttttagtacatattgcggcgatataaacggaggtgttctcgtatgaagtacgtagtattcagcgactattgtgacgctagccaagcgatctacgacaattacgaagatgctctcgctgatttcgaagaacggaccactaactaatcctataacggtgttgatgcgtacatttgcggagttattgacgaatacaaaacggaatagcgtaacgattttcacgcgcaaatcacacgaaattagacgccttagccttcgccgagggtattcggtagggtaacggttagaaacgctaatttcgtgtgattttccgggtagcgagacaactcgcaaaataagcggaatggtttttgagcgcctgatcaacgctcccatatccgcgcggaagggttattttcggtcttaccttccgaaaactacgtcgccctaccttgaggcggcgggtgttaataacgcaatcagaacgagggcgatccgaatatgggtcgctctttttgtgcttgcgataaataagccggaacgcctctcaacgatgcggaccaagcccggtggataaagaaacgaaaaaggagacgatgtgaatggcggaatcaaagcgcgaatcaatcggcaaaattaaaatcgacttggatgtatccgacgcgataaccggactcaaggcggttcaacgcgaagcaaaggcggcgactaaggcgctggccgaatttcaggacctagctgaacggctcggtgagaaaccgttagctgacggttgggagacggcccgatcattgcggtctatattcgataggttagacgaagagcctaccgtttatctggtcggaaaggaaattcgaaggaggagcgctgatgagcggtaaaataaccgttaaacttaccgccagcgacgaatatgacgaacagctcgatgaattgcgccaagcctttttcgctctgtccgacggccctgaacaagaagagtggcgactcgctctcgttgtaggaaggaccgttagcgaagccaaaacgatatggaaacgggtgaaaacgaactatccgagctataagtacacgcaatttgtatcgcgtaatccttacgtactggacggcataaatccggaaaacatatcgctatttatgctaccgggctacgcggataatccgattgtaaacgatccaatgtttcgatggattatcgataatgcagccgaagttatttacgttgaggagggggcggatgagtaacgttgtagcgctgaacaacagagaccaaccagaccgcaagccaatgccgaatgacaaagccgcgctcttagacaatccgcaagggttcgaggtatacagtcgggagcttatgcgcaaggtatttccgcgtttgattaacgaagcttatgatgtagtctatgcggactacaaacgaaagcctgagatacgcgatgtggtggtgttttactttctgttgcagtcgtatatcgacggtaactatacgcgcagtgacggaagccttaacgataggttcggcgcttgcttcttaaactacgaaactattcagcagcaccttcgcgtcgatcgtaaccggattaatctgctggccgcgatcttagagactaacgggatcatacggacgaccggacattacgaagggacaaagcgtttcaagtggtactttccgtcgttctgtccgcacataactgacgatggatatatcgttaatgagttcggcgaaacggtgcgaccggactttagcgtgtacttgccgaagcgtcgaaaacgttgatatgacgcatagtatgcacaggacatactaccggtaatatgcgcaggacatactatcgatcgtatgcacaggacggattgtaaaaagagaaagaagtaaaagagcaatatgtaaaagagaaacaaataatagcgtctctattcgctgcgctcatacgatacgcagatattagtagtctattaagtaccttatcgcgataaagaacttatataaaagataaagacaaagtgcaacgatattggtggggcgcgtcggattggtaaatcaccgtagagtgattgacactttagtacgagaaaggagggatgacgttggctaatccgattaatgctgcgcttaatgcggtcaagtatatacgtagtaagtacggcagtacgtccgtatctactaagccttataccggctatgtaacgcctatcacgtttactacagcgaagcgagagaattacgttaaggtaaagcttccgggatacagtacggaagaagaacgggaggcaacgaaaagcgtcatatccggactaatgaacgatggagctaacgagtttatctttgcggtaaatgacgatggaggattagaagtacgctataaacggaaggaaacggagggatagcgttggaggtcaaacctaaaccgaacttactaacgatagaactcacggatgaacaatcgataccacgcgtcatatacaaaggcgaagaaattaccggtcgtattgcggtagacttcgagtggcgtactaaagacgcagaccaatgcggctctacttattaccgtatcaaacacactaaggatagcacaggcgctccggttgtagagacgaaggaacttgcggtaggcgaacgagcttatgaatagagaacgtaagcagcgttatagatacctacgagagcaacgaaaggaacgcgactatgagcttggatttatacaactggcaggccgtccgttctgtaagcctagattaatacgactgggtccagcgttaaccttaacgcgattcatggcgggtgcaaggcgatgagtaactactatgacaaacataagcgcgatcccgaagcacgagcgttctataagtctacagcctgggctaagtgccgggccttagtactcaagcgcgaccatcacctgtgccaagactgcctcgctaataaaacgatcactaaagcagagactgtacaccacataaaggagctgcgagaataccctgaattagctttagatgcatcaaatttggtcagcctttgcaattcctgccacaacaaacgccatccggagaaggggcagaaaagtgccaaaacagagaagaaacagagaaaaatcagggttgtaaagacagaggctaaccccgaattatagccccctcccctctggactaaaaaacaaaaatacaagggaccggcgggcccccttcgcttgttgcgcgaccagaaattttacattaaaggggggtctccccgaatgaaaggagtgttttaatggcggtaccgacagcgaaaaaaatccgggaatacctcggagacaggtataaagaatcggatgaagaactgatcgaactctacgttgacactcataagttttaccgccgactaaaaaaggaagtagccgagaaccctttaatgatgcggcatacgaacaaagcaggcgcggagaaccttgtcaaaaatccgttagcgattgagcttacgaagacggtgacgacgttaaacaatcttctgaaatcgctcgatcttacgccggctcaaagaaaagaattaaacgcgggcggtgaagaaaatgacgacggtttcgatcagctctaacccgacagacatcgaaaaatggtataaaaactggctaaaaacgcaaaaaatagccggatttatacgcgaaaaaccggcggaaaagttgcttacaacatggtatgcggaaaaagtagtctccggggagataatcgcaagtaagaaaaatattctcgcttgtaaacgacatcttcgcgatttaaaacgcgcaggaacagacgaatttccatacgtttttaacgaagaaaaagggcatcgccccatacagtttatcgagaagttttgtaaaccgtctcaaggacaatacaacagtttgacgcttcaaccgtggcaacattttgtgatcggatcactgtacggttgggttcatcgcgataccggccttcggagattccgtgaaggccttgtttttgttgcgcggaagaacggaaaaacaacgaaaatcagcggtttagccaattttgcgataacaaaggacgacgaaccgggcgctcgggcctacgtcttagcaaactcgaagcaacaagcgggtgttttattcgaggaaagtcgtgcaatggttcagaagtcgccggtacttcggaagcgtctgcgcgagaatcaaaaaggcatctaccatgacgcgtccatgagtcagatcgaggcacgggcgtctgatagcgaaaagttagacggtttgaatacgcacctcggcatattcgatgagatacacgaattcaaagattcaaaattgatcagcgtaatcaagaactcaagggcagctcgacggcagccgttgatcatctacatcacgacggccggctatcaactcgacgggcctctcgtcgaatattacgaaattgcttccgatgttttggacggatctaacgttcaggagcggaatttttactttatggccgaattagacgacatttctgaggtggaaaacccggaaatgtggatcaaagcgaaccctaacattggggtaacgatggatattccgtcaatgattcaggacttcaatgcggaccgtcacgtccctcgtgaatacaacgactggctggtcaaacggtttaatatcttcgtggataacggagaggaaagcttcatagacttcgaagtcatcaagagcaataacggacatgtcgatccggaatcgttgcgtggtatgagatgcattggcggcttcgacttatcacaaacggaagactttacaagcgcgtgtctggagtttttgctgccggataatcgcgtttttgttatgtctcattcgtgggtaccggcggcaaaagtacaaaaagataacgaaaaaatcgactaccgtgggtttgaagccgacggttttttgacgattatacccggaaattacgttcagtacgagtacgtttacgactggttcgttgaaatgtcgcgtaaatatcagatcgataagatcacgtttgacccagcgaatgcgatgcgattggttcacgatcttcaaaactacggatttcaaaccgaagttgtgcgacaagggtacattactctgagtgacccgttaaagcatatcaaagaattattgcttgacggaaacgtcgtttacaacgaaaacaagcttttcacatggtatctaaacaacgtcaagctcgtcgaagatcggaacggtaactggttgccgactaaacaaacgaggtaccggaaaatcgatggctttgcggcttttctgaacgcacatacacaggtttatctcgatatgacgaagccggttgagggcggaagcgtcggatttatctcaattagcgatctattaaacggttaggaggtgagaaattgggcttttggagcaatgttcggaacttttttcgcaagccatccgatgtcaaggcagaaacgagaagggatctaacacactggtatattcctcgagctactattctaggaaattacggagaacatgcgctggctgacaacgaaacagttttctcggctgtgtcgcgattatcaaacacgatgtcaagcctaccgatcaaggcgtataaaaattatcaaccgattgagtctcaggcttccgagcttctgacatacgcgccgaatcataacatgacatccgggcaatttatcggccttttggagacgcatcgggccgtatatggcaatgcttacgcaataaaacggtacggaatgcgttatgaagtcgttggattagaggttttggatccttcgagagtgcagccggtgattgaagagactactcgggatctttggtacgagattttaggagacaacggaaattatttcgttcacaacatggacatgattcacgttaaaaatacgtcggtagacggtctaaaaggaatctcaccgctaaaggttctgcggaacgccctcgactttgatcgagatgtccggcttttcagtctagaacaaatggatggagcaaagatatcattcattttggaattagcgaaccaactcgacgatacgcgcaaagaaaagatgttagagaactttaaaagtttctataaagacaacggcggcctcttaattcaggaaccaggggtaaaaatccgcgaattaaagaaggaattcatcgatacaaaggcgtttgaggtcgaaaaagtgacacgttcaagagtcgcgcaggcctttaatattccgttgtacatgcttggcgagacacagggcagcgtctccaatatggagcaactttatatcgattatgtacaaggaacgctaatgcctatcgcaactcagtacgaaaaagaattcaaccggaagctgctgactgaaaaggagcgcaagtccggttattattttaagtttagtatgaacgcgttattgcgcggagacatgcagacccgcggtaatttctatcaacaaggcatccggagcggctggtttaagccgaatgaggtgcgtgcatgggaggatttgccgccagaagagggcggagacacgctttatttaagcaaagatttatttccaatcgaccaggttgcgcaacagaaaatcacatcggctgatgccccgacgcctccatcgttagaaattaacgaagatgataacgaggactcgaaaggaggtgaggacgataaagaagttctgggaaatcaaagcggcgaagaatgacgctaaaacaggcgagatttacatttacagtgaaatcagttcggcccagttctggggggacgaagtgactacgcaaactttcaaggaggatttagacggacttggcgaagtatctgcgctaaatatctatattaattcgccaggcggctctgttttcgaagggaattcgatctacaacatcataaagcggcacaaagcccacgttaacgtctacgtcgacgggctggcggcctctatcgcaagtgtcatcgcaatgtccggtgacgctatttttatgcctgcaaacgcgatgatgatgattcataatccgtggactgttgcgcaaggcaatgcggaagaactccgcaaacaagccgacgacatggatcgtattcgcgaaagtcttatcgaggcatatctcggaaaagcaggcgaaaaactcaatcgtgatcgtttgatcgaacttatggacgcagaaacgtggctgacggcgcaagaatgtctcgaattagggctgtgtgattctatcgaagctcctagcgctgcggttgcgaaagtggatacgcagttatttgcgaagtaccggaacactccggaatcgcttcttaatcagacgaaagaggacgaaaagcaggcggaaaaagagcgcctgttccgtgagcagcttatcgcggaagcacaaacgaatttactaaaacttcaaaacgggggaatcatttaatggaactatttgatctgaaggcaaacttaaacactgtaggaacacaattagcatcggttgaaaaggaaatcatgaacaaagcggctgaccctaacgcttctatcgatgaagtacggtctctaaaacaaaaaagagacgatcttaaagagcgtatggacatcctgcaaaatcaacacgatactttagagcgggaacaaaaagctaaaattcaagcaagtcttgaaaaagcaaaagcaggcgcgtctgctggacttaacagcgaagatccaaaggttaagaaaatttctgctaaagcaggcttaatccgtgcaacaatgagaaaagaggtaccggctcctgaagtacgtgctgcgctaggagataataacggaacaggtggggagaaactccttcctaaaacagtttccgaagaacttattcacgaaccttttgtaaagaatccgttgcgtgaactttcaacgtatacaagtgtaacaaatctcgaaatccctaaagttgatttttcccttgacgatgatgatttcatccaagatttacagactgctaaagaacttgaagtagacggagatgtggttactttcggacgccgcaaattcaaagttatggcgaaaatctccgaaactattttggcggctactgatactgatctggtcgctacagttgagcgcgctttacaatccggcctagctgcaaaagagaaaaaagtttctttcgcagtaacaccgaaacagggagaagaggaaatgtccttctacgctgccggaattaagcaagtcactgcggaagataaatataaagcgatcaaaaaagctattgcggatcttccagaagacttccgtgaaaacgcaaaagtaatgatgacatacgcagactatctcgaaatcattgaaactttggctaatggaagtgcaactctttacggtgcacaaccggaacaaatcatcggtaaaccagttgaattctgtgatgctgcggttgatcctatcgtcggtgacttccgttactctcacttcaactacgatccggcaatcacttacgaaagcgacaaagacgttaaaactggcgaaaatgtatttgttcttactgcgtattttgatcacaaaatcaaactgaaatctgcattccgtatcgctaaagtagacactactccctaaagcaccccaagggctaaaggcatcttcgactgactcatcggtgtccctcagttgggatgccgtagcctttgttgggggaatcaaagaatacgaaatctttagggacggggtttccgtcgggacccgcgttggcacgtcgtttaatgagagtggtttaaagccggaaactacgtataaataccaagttcgggcgatctcaatggcgggaaatccatcggagctgagtgacgagctttccgttacaacagagccgacgcctgttcctgatccggaaagcatcagcgtcagtccatcgtctaagacattaaacgtaggtgagacgcagcaaattaccgcaacagtatcgcctagtggggctgatcagggcgtaacatatacgtcaagcaacacgtcaatcgcaacggtgactagttccggtaaggtaactgcggttgcagctggttctgctacgattactgtaaaatcgaaagtgaagacaacagttaagaataccgtatcgatcactgtcgtcgacccggcgccgtctggcggtgagtaaacatggatatatctctggatgaggtaaaagaatatctgcgtattgatggagatgaggaggattcccttatctccttttttatttccgcagcgaagacgcatcttgaaaacgccggtgtaaccgacaaggaatctgaattatataaattggccgtcctcatatacgtcacagacgcgtatgaaaatagatcaacggcattgagtggaaataaagtagctggaatcgtattgcaactgaggtgatctcgtgaaaacaggcgattttaacaagcgaatcacatttcttcggtttaccgaaacgacaaacggtgagggattcgaaataaaggaatggttaccggttgcgaccgtctggtcagcggttaagacggtccaggggcgtgaattttaccaggctggcgcagtacaggcggacagaacagcacgatttgttattcggtattcaaaacggatgaagtcgcttcttagaaatgacttgcgcatttcatacgcgggaaggacgttcgaaatagaaagctttataaatgacgatgaacgtaacgtcacctttacgttagtgacgaaggaggtcggaatcaaatgagcattcagatttccgggtttgacgaagtaatgcgaaacatccaacgtatgggcaatcgggctaattcgttaaaatccggcgcattagatgccggagcaaagcctatctataaaactatggaagataacaacccaagtaaaagatacaagatcgctgtcgaaaaaagtaagtcagacgaagtagtaatcggtcctgaaaaagactttttcacagcgcattttcttgaattcggcacaagcccacaccttataaaactgcgaaaagccaagatacaaacagacggccaagttgtttacggtaaggaagttaaccacccagggcacgctcctcgaccattcgttgagccgtcttttattgcgtctaaggaagatgcgcaacaagagattgttaactacctgagaaggaatttattgccatgagtctacggagtctagtaatggcgactttaaaggatattggcgtacctgttcgatttattacgtattcgggcgacgaggacacgtacattctcttttatgtttataccgtatctgacgcactttcaatggaggatgaagaaactttcgctaatcactatgttcagattagtatcttcacaaaagacccgacaaaatattcagaattagaaaaagaggtaaagagccggctcaaacgagctggcttttttcgttcaaacgagcaggacctttatgaaaacgaaactgagctttttcacaaagtcttgcgttatgggacgacactaaatacggaagaggagtgaagcaacctatggcaaaaggcgtacgcgtaggtttaaaaaatatacactttgcgaaaattctaacggaagatgagaacggagttacttacgatactccggttaaaatcggaaatgcgatcgaagcaagtatcacaccgaacacaaacagcgaaactctatatgctgatgacggcccttcagaagttgaatcttcgttgggagaaacggaagttgaaatcggtatcgatcaattatcaactactgcacaggcgttgttgctcggtcacactattcttagcgatggtgtactagagaagaaagaaacggatatcgcaccgtacggagcgttgctttttgagtcagctactactggagggaaatctaaactttacgcgctatataaagggagattccagccgcaagaggagtcttttgcaactaaaggagatagcccagaattccaaacagactcaatttctggcgtatttgtacgtcgcgatcacgacaaggtttggcaacgtagcgtatttacgggagatgagggcgtgaaagcagaggttattgaaaactggtttaagaaagtttacgaaccaacaacttctactccctgatgcgccccagaatctacggtacgacagtacgacagattctattacagttgaatgggatcccgtagatggggcgacttcatacaacgtttacagaggcgcagacaagaaattcgctgaaaacgtgacgcaacctaagtatgtaacaaccggcatgagtccggatactaaactcacaattaacgtaacggctgctaatgagtccggcgagtctcctatgagcgaaattgtgacacaaacgaagatgaaaatagaaacggagagctaagtttttagctctctttttattaaaaaaaataaagaaattaggagtgtgggttatgcaaatcacattaatgattgatggtgaagagaaggtatttcaagcacctttcgtaaaggggcgtatgttgcgggaagctattaaactttcgaagtcgagcaactttgatgatttggatgttgaagatttggacgcattggtaggttacgtagtccgagtttatgacgaacaattcgatatcgatcaattttatgatgggatttcttctgaaaaactaattcctacaattacggaaacaatccaacaagtcgttggaactgtagctgttccaaatgaacaagttggcgagaacaaagaaactgaagcgcaggcaatcggtgaggtaaaaaactaacaccggggtatattttaccccttgatgttttagatcaacttgatagggatctcaaaaagctctatctcgacaactccgaaaaaccctcggatatctattacctagacgaaatggacatcgggtggttttgcgaactaatgaattttagtgatggtggtagctctcacggaagcggaaaaacacaacaaaaactcggctatatcgatcagataccgggtttttagaagggaggtatcggagatttggcgactgaatcagtcggatctatacgcgttagtttaggtctagacaacattgacttctctcgcggcctccaggacgttaacagaaaattaaaggtactaaactcggaattcaaagcagcaatggctggcgctggccgattcgataacagcctggattcattgcgtaataagaccgacatattaaatcggactttacaaacgcaaaaggcaaaacttaacgagttgaagcggcaatatgaagagagcgtaaggacgacgggaaggtattcggcacaatccgaaaagctcctcgcccagtataatcgaactgttgcagcggttcggaaaactgaggatcagttagaccttcttaaccgtaaaatgagagagcagagcaacggcttcagtcaattaggcgctaaaattagcgcaagcattaagacgatcgatacgaagttgcgcgtattggattcgtcatttgaggccgcatcagccggcgtaagggatttcggttctactaccgagcaactacgacaaaaatcggaacatcttacgcaatcgatctcgttacaagagcagcgacttaaaaacatccgccgactgtatctcgaagctaaacgcgcaaaaggcgaagatgctcaggcgactcaagaattacgcgttcaaatgaatcaagcgacggcacaacttcgaacaactcaagccgaactggccgcaacgaaccgacagatccaatcgaacacgggccgttggaacgagctcggcaaccggatgggtgaagtcggggaccggatgcgggacgttgggggtcgaatgcaatctgcgggatctgaaatcgcgatgtcattcggcgtagcgacagcggctttaggcggaggtcttgcggtttcaacgaaaaaagcgatggacttcgagcagcagatgtcgagcgtgaaggcggtcatgaatccggcagaagccaaccaatacagcgctgcccttacggaattagccattaaactcggtgctgatacgaaatacagtgcgcttgaagctgcgcaaggtatggaagaactcgtaaaggccggtgtatctacgaaggacatactgaatggcgcacttaagggcgcgctatcgcttgcgacagcgggagaattagagcttgcggatgcggcggaaattgcgtcgactgcactgaatgcgtttaaagacgataatattagcgttgcacaggcagcagatattctcgcaggggccgcaaactcttctgcaacaacggttggagagatgcggtatggtcttcaaatgacatccgcagtagcagccggtatgggactgtcttttaaagacacggctactacactagccctcttcgcacagaatggacttaaaggatcagatgcaggtacttcgatgaaaacgatgttaagtcgtttagtacctatgacaaaagctcagtacgagacaatgcacgatcttggtctagtcacccttgatacttccgaagcttttaaacgtatggctgataaaggcttcaaaccagcgagtaaaaatatcggcgatatatacgaggcacttaacaagtatgttgaaaagacgacaggagcgaagcaagggaccgaaaagttcgagaaggcctttgacaaagccactcggagtcttggaatcatggacaataaattttttgatgctaacggaaatattcggagtatgacagaaatatctggggagctttctaaggcgcttgacggtttgtccgcaaaagataaacaagaagccctttacaatattttcggtagtgacgctattcgaggcgcgttgattcttggtaaggaaggaagtaaaggtttcgataaaatggcggctgcaatggataaaattaaggccgataatgttgctgctgaaaaaatgaataaccttaagggtaaaatcgaagagctttccggtgccgtagaaactgcacaaatttcatttggtaatgcgctaaccccagctatctctgcactcgtttctgtgcttcagagcgcgacggactggtttaacggtctatctaaaggaatgcaatcgttcgtagctatttctttagcggttacaactgtaattatgggcattgttgcagcgttaggttttttaatgctaggtgtcggccaaatgatatctggactcgggactgtaagcggtcttttaaaaggtttgataaaaagtgaaaagtttataaaggttttaggtgttgcattcggagcacttacgagtccgatcggccttacggttcttggcataaccgcggtaggagcagcacttgtaatcgcgtacaaaaagtctgagaaattccgtaattttgtgaacggggcctttgagtcagttagaaatgtgacggttacggcattcagcagtattgcggcagtggtaggcgacacatttaattttatacaaaaagcttcggtagccggatgggagagatttgctgacggcgtctccgttattgttccggcagtacgacagcgatttgctaacgtggttaattcgataggtgaattcgtttcaaacatcggatcgtcgatcgcagatagattcggttccggactagcggatagagccggctccgcagtagatttattcattcagaatttaagggctgcgttttcgagcgtgggcggaatcatatcgattttagcgccaaccgtgactgcgttagggctggcgatggccggagtttccggatctattggttttgtcatcacctctcttgttagtctagccggttttttattccgactatatcaaacaaacgaagagtttagagcgtctgtacagaacgcctggtcacagtttatgtcggtgatcggtaacgttgtagttgcgattcagccaatcataaatcaatttatcgggtatttttcggatattgcagcagagcttgcacctgaattcgcgaaaacgggcgaagtcataatgtccagcattagttcgttaggaccaacgtttactgagctcggaaatgcttttggggaattgtggacaacgttaggtcaatcattctctgaaattgcggttcagatagcgccggtaatccaggaattaggcgtgactttcgcggcgtttctaccgcaagttgtaactttggttggacagttgattcagacatgggcatctttccaagtccaattcgcacaacttattatgcaagtcgcatcggtactattgccaatgttagctcaagcatttacatctttgcttccgctgattttacaaatcgtatcgtctgtacttccgatagtgctacagttgattcagtcccttgttccagtagtaaccactattgcgactaccttgttaccaattttgctacaggcgtttcagtcaattttcccgccagtactggcgataattcagtctgtagtgcctatcgtcgctaatctgttaacatcagttgctcaaatcttgagtcagttggctgtaaccttgctgccactcattctgcaagttgttcaggctgttttccctgttgtaacaagcatcattcagattgccatgcaggtagcagtaacggttttacagttagtggcaactataattcgtactgttcttatcccagcgatccaattcgtgctgaaaattgtgcaagtcgtgttccctgtagttgttagtgtaatccaaaacgcactcaatatcgtgatcaacgtagttaagtttttcactgcgctactaaaaggcaattggagtgcggtctggaatgcgatacttgggattctgaaaagtatttggaacataatcaccgcagtaatccgaggagctgtaaatgtagtcctcacactcttttctggattggtcaatggggcagttagcgcctggaatttcttgaaggacagaacagtaggtttgttcaaatcaatcgggaaatttgcgaccgacacgttccacaacatgatcgagggagcaaaggcgctaccaggtgaaattggtgacggaataaaaaatatggccggcagagccctatccggagttaaatctctaggaaatacgatgatcggcggacttgaaggaattatcaatggcttgacgcaaaaagggattaacaagctactcgatacattcggggtggataaaaaactccggatccctaaactcgaaattccgaggttcgctaaaggtacgccagcaggtgggcacaaaggcggtcttgctatcttaggagatggaggcggtccggagttattccgtacaccttccggtttcacaggtttaagccctggaaccgacacgctctttaatctgccaaaggggacgcaagtcttgccgcataaagaaacacgcgaggtactatcttctggaatccccgcattcaggaaaggtacgaagaacaaaagtttcttcgattctgctatcgatgttggaaaatccgctgttgatgcgggtaaagctgccgtaaacagtgttaaggatttcgcttttgatgcgtgggaatacgtaagcaatccgtcaaaacttatcgctaaaacgatagaaagtctcggactgaagttgccggatatttccggagctttcgggacaattgcgaaaggtgccttcggtaaagtcaaagattccgccgtcagctttatgaaaaagaaactcgctgactttggtggagctttcggaagtggcgataaagcgtccggaaacgttaagcaatggattcgggcggcgatggctaaaacgaattcgccagcttcttggttcgccccactcgttacaattgcgatgaaagagtccggaggccgtacgggtccgtctacaattaaccgttgggactcgaactggagacgtggtacaccgtcaatgggtcttatgcaaacgatcaaaccaacgtttgatgcgtataagcttccgggcatgggcgacatcatgaatccggtccacaacgcggttgcggcgattcgttatatcaaatctcgctatggaagtccttttaatactccaggcatcagatcgatggcgaaaggtgggccgtacaaagggtataaaatcggcgatattgtgacgcaaaagcagctcgcctggattgcggaagaaggtccagaagcgattattccgttgcaaaaccataggcagcgggcgcagcaattatggacggcggcaggaagagaaatcggtatggatccgtctggtggaagtaacgaggaggaaattgctttgctacggggacaaaatgcattactgcgccaaaccaacacgttgctaacaggtattctacgtaaggatccgaatgttattgtcgactcgacggcgcttacagacagtgtagaaaaaggccaagcacagaacatcggattcaataaattgttgtggggtgatcgataattggcgtacctgacgattataaagaacggtgagactatcgatcaccgtaagtacggcttaaagcttttgagctttcgtaaagaatcattaacacaccggactaactacgaggaagtagacggtcgtcacggcacgattgataccggaacaacgttcggtgagcgaaagctcaaagcgaagtttaagattcagggcgtagaccatctcgattaccaattggtgatcgatgaggtttacgctttatttgcgtgcgaagaacctatagaactaatcgattcgagacagccaggaaaagtgtggacggtaaaaccgagcagcaccttcgagccagaagacgtaaacccaaggaccggtacatttgaaattgaatttacgtctccgttaccgtttgcgagttcagtcggttcgacacttgatcctttcacatttggtgaaaatatttggcagataggtcagggacttatacccgcggatgaacttgtctatatccatcgcactaaaaaattcagaatctataacgctggtaacgtaacagtcgatccttgtaacgagatgcctctgaatatcgtatattccggatcatccacaaattttgcgatcaagaatataacaacggatcaaactgtttcatacaacggaacaacgaaatcaaccgacaagataaaactcgaggggttgcgtcatctgaaaaacggtattagcgtttacggaaatactaatcgaggatacatttcgttgaaacctgggtggaatgacatcgaactttctggtacatctggaagtttcgaaatctcgtttgatttcttctttttctataagtaggtgaatcaattgaaaatattagcggttaaagatgcaacaggtgtaatggagccgttgccaggctttgtgacaacgcgaactgacggtagtgacggtgcgcggtcgttaaaagttacgggggtcaagactaagaataatcagtctggctataaccttgtcaaaaatgaaaatacacttatttttgataacgaagaatatatcatcaaaacccaccgagaacgaacgtaccggaaaggcgtcggagttgaagtaacggccatccatcgtatcttcgacgacttaatgaataactatatatacgaagaaaagacgggcacgcttcgattggatgcgatgctctcttttgcattagcgggaagtgggtacactttcgaaatagatacgacagacttgccgatatctgtcagggtagaaaatttcggttggaacaattcgcttgctctttttcgtgatattctcgaaaagttcggagcggagttcgactatagaggcaagaaaatctacgttgctaaaaaattcggcattcaaagagatgattcattcttgcgatataagttcaacgtaaaagatccgcaaaaagagatcgataccagtagtttttcgacatatattcgaggatatgggaagaaggacgaaaagggcaattatttgttcgctgaatatacgagcccgttagcggaattctacggcatcaaacatgcggatccggttaaagacgaacgatacacagataaagaaagtcttctagcggccatgaaaaagcagctaaacgatagcatggatatatccctcacgtttactgcaattgaacttaaaagcatggggctgtctgatattaaaaaaggtgattatgtatggtgtgttattgagccttttgatttgaacgttcagctacgagcggtgagtagggaggattactctgacgaatccaaatcgcctacatttactttcgggtcgatagcgaaaaaggcttctgacataatcgcaagttttaatacaacaaaaaaagcggtcgacaaagttattgatacttcaactggaaaaataaaagactctgcaataaatatgaatggaatcgcaaccaaggcggaacttcagtcccacataagtaatactgttgtccatataaccgcagaagaaagagcgacatggaatgcggcttcgaattccctggataatctagattcgattacatgggcaactccaattcttaaaaatggctgggtgcagtacccagatcaaagttggaattatccgattcagtacggaaaagatttcgttggtacagtctaccttcgaggcgccatatcctcaggtacaattggtaacgctataccagctttcactcttccagttggatataggcctcctttcccgtacttgtttatcggagtttcgtcagtgtctccagatgggattccacagtatttccgaggcgtagtcactcctagtggagatgtgtgcatcgaaaacagttctagtgcagagttgtcgaaccaattcatcggtatttatacgcaatttaaagctgtataataggcagtcataccagggtgaaaatagcaaaggaggagacagatgccgaattacccttataaaaaagcaggcaatgctttcgatcgtgattttagaaacagctacaatgacaatctagtggatattgcggaagacattagtagatcatacaatggattaaaatctcatattaaaggtcaggcatcccatacgtccgatcaaataagccaccttgacgggttaacagtctcagatgagattgagaaaacgaaaaaacggatcaataacctaattttaaacgcggacggaacaaatataaaagaggttgtagacctccgagtgaataataaaggggaagttttcgatacagccaacgatcgattattcaatacagaaagtagaattgataacctttatggggagcaagtaaaaagagatcgaaagttcgaggagtaccttaattatcaaaaaattatattctctgttttggccagggataactctctgccattcccacaagccatttctataaatcaagaagacgatgagttgtatattgcaaggcaagaaaacggtggtagtgtttgtatcatttcgcgctatgaactatctacatcagctctgaaggattcccaacaatttacgatcacaagttcaacgtataacgagggtattccttggtttaagaactcagaaggggaattgtgctttcttgtgaggcagcagtttgaaaatgagctttctatctttaactataccactggggaaatagaagaaacgatggaagttctcggatcatataagacgggaaatgatatcgataaaaaatacttcgtttccggaaactcaacgaatgagagaatggaccggatatacatttatgattttcaaagtattatcgcaggaagtcctagattgctgatggaggtctcagtaaacaaccaagagattatgtttgaaaaggtacaagggattactttccatgataataaaattgtcttaggacaaggaaaagattaccctgcgattaccgttcttaatctagacggaagcattgctaagtcgtattcattctcgaaagagtcattcgctgacttaattgagcagaactacgattttgacagagtcaattacgccttcgaaaatgagggtgtttgtatgtttaattatgatggatacgttattccggctctgatgcaaatagcggttgaaagaagcggtagggaactggtatttgtgacgttagctggagcgcaagacggaaagctaatcgagactgctccgcgaccgcggccgaatatcacagatataacgtacgataaagtcgcattgcatatgccgaacaggaacttcgtaactaacggagccttcgacgtatggcagcgtggaactagttttactgatgatggtgtattcactgctgacaggtggctcgttaatgctgttggtacaaatgagagtgggatcaatcggaccgagagagtgaaaaagccgatgagtgcgccattctcaaataagtacgggttgagaataacgaaattgaaaaatgtttcgaatatgtcgcgtactgatctaattcaacggatcgaaaatccaactcagtttaaaagcggcgaagattatactttagctttatgggcgaggaccaataaatcctctcacagaatgaaacttcatcttgatatgacacatgatggaaaacacgacaatcttgcaatccgttcttgtcaagtaacaaccaggctcacattctttgtattgaacataaagatgcctgatatgtcagcttataaatttaaggaagaagactacgttgaagttcaaatagatgtcgacacaacaaacagttcttcctatgatagtttggctcccggcgaatgggtagaattttacctagtcaaattagaaaaaggaaggcttgctacgccgtatgtcgcaagaccgttgactgaagaaatagctgaatgccagagatattatcagatatacagcacaaataccgttaagcaagttgatctcagacctacaatgcgtaaagcgccaacagttacacaaagatctgacgggaattacgggtacgatgcggagctacctgaaactccaacatactaaaagaaagggaggtaatactgttggctatttataaaaccggctcttacacgtttgatataaacccgataacagaaggaaattataattcagcttttatattttcgacgcaagatattaatacggcaaagttgatattttatttacgcaaggacggcatccctttgcccctatcagctgtgaccgggaaagtaatcctcgttccgccaagcggcaagcaaagaatacgggacgtcacgatagtcgatccgttgaatggtgtcgcagagtacgtattggatgaggacgaaatcaaaatgtacggtaaattcgactgccagctaattttgaaatacacgaacggccaatcactctctgcgcataaattcggctttgaggtatcgcaaagtcttgcggaccagaatatcgcacctcttgcggaatattacgtcgatgatttcgaatcgttaaaggcgttaatcatagcgatgtatgacgaagaaacagtaatgcttgacgagttaaaagcgaagttctcggacctcggacggattgagacgaaagagggcgcgcaggaaaaggcagatgctgcggaagctcatgcaaaggcctatacggatgcacacgcagccaagacgaacaatccgcacaaggtaacaaaagctcaagtcggcctgtccaacgtcgataacgtcaagcaagcatcgaaaacagagtttgatagccacgctaataataagagcaaccctcacgctgtaacgaaggctcaagttggattggctaacgttgacaacgtaaaacaggcagcgaaaacggattttgatgcacatactgcggataatgtgcgccatattaccgctgatgagcggactaagtggaataaggggcaactgtataaattgacacaagataatggtgtgcgaatccttattcctgatggtactgatttattaactttgccgcctggtttttattacggtatcaataatagactgcttaataaccccgaccctaatgatgttggatggttcaattatgacattatggatggaaactctggaagaaaaacaattatagccacagcaagttacaacaataagatgtggttcgcgaccattcatacaaatggtgactttaggggttggaaaagaatattaacttccactgactttgaacccgtctggactgaagttcctttaaaaaacggcgcgaaacatggggctagaaaagttatgtgtgcggtggttggcggttttctgtgtttaaaaggcgagattatcgccgatagaggcgtgatttttgggacgctaccagcttcttatagacccgaccagctccgcagtagacttgttcctatattcggtacaacagggatgactaaattgtatatcgaaacaaacggaaatatgaggttggaggggcaaatcgctgataaatccgagaacataacttcttatggtttggacgaaattattcccctgtaggagagataagtcatgaaaaacatttttaaatatgacaaagagacgttcttgttgattgataatgatatcattcagcctgatgatcaagggaactatgaaattccggatggatggacagacattccttttgaccctggtttatatcttccgaagttttatccggacgaaaaggtgtggaaggaatcggctacaaaagagtatattgaaagcttgcagcctccggagcctgatcccggaccgtcagaaaccgaggttctccggaaacaagtggcggatttatactacttaatcgcgttaggaggttcgtaaatgccaatcgattggtacacgtatattaaaggattctacgaagacggtctttggacgaaaaagcaagtgcatgacgttgtggctgccggacggatcacgccggaacaatacgaggaaattaccggagatccttacgatcctgattcgccgccaaacgaagacgaaaacgtaactaatagcgaacaggaggcgtagtcattgggcgagctcgacgtaatcaaatattttcttacgcaagggccgttcgcggtcctttttacgtggttgctgatttacgtaatgaaatcgaatcgtgaacgtgaatcgcggctacaggatctactcgataaattcagcgataaatacgacgtcattatcgacaagctcgatagactcgaagagaaatttcgcggaagagaataacgcgcccgttcggcgagagtccggcgggctttttatatacgcaaaattaacgaaaagggagacgattagatggcgatttcagtcaagaaaaacctcgtcgcatcaagcaaatatcacgttaagtgtccgtattcaatggatgcgaagtacattacgtttcacaatacggcgaacgacgcttcagcagcgaatgaaattgcgtacatgatccgcaataacaaccaagtatcgtatcactttgcggtagacgataaagaggtcgttcaggggattccgacaaaccgtaacgcatggcattgcggagacggcaacggaccaggcaaccgttcatctatcggcgtcgaggtttgctattcgaaatcaggcggcgctaagtataaagcggccgaaaaacttgcgattaaattcatcgctcagcttttaaaagagcgcggttggggcgttgatcgcgttaaaaaacaccaggattggagcggaaaatactgcccgcaccgtgtactcgatgaggggcgttgggatgcggtgaaagcggccatcgctacggaattgaaagctctcggcggtcaagcgtctaaaccatccggcacgacttataccgttaagaaaggcgatacgctttccgctattgctaaagcgaatggagtaagcgtggcgaaccttcagagctggaacaacattaaagatccgaataaaatttccgttggtcaggtgctgaagattacagggacgtctaaaccggctgcggctccgaaaccatccggatcttctaaaaagacgttcacactgccgggcggagtccttaaagtaacgaacccactgacgaaagggacgaaggtaacgcaagttcagaccgcgcttgctgccgtttacttctacccggacaaaggtgcaaagaacaacggaatcgacggctattacggttcgaaaacggcgaacgcggtcaaacggttccaatcgatgcacggattgagccaggacgggatttacggacctaatacgaaagctaaactcgctgctgcgctgaaaaaagccggctattccgtaaactaatcgaaaagggagacgatattatgaacgtaaagacaatcgaaaatattagcgcgggcacagtcgcccggttcgtactacttgcgctagcactcgtgaaccaggcgcttacgatgacggggcacagtccgattccggtcgatgaagaaggcgtgcagcaatttatttcgctcgcgttcatgggcgtaacttcgctgtgggcgtactggaaaaataacgacgtgacgaagaaagcgcggacaaaaggcgaatagatagcggaacttttggcgggcgcctgcgtataaattcgtaggtgctcgtatacataaatcagctataatataaataacggaggttgatcgaatggatttcgtacgtgtagaagtactgaagaggcggatgtcggttgggcgtataattcctcgcgttctttcaggcctaattggattgttcttgttgttgatcagcataatatcaaatgtgcgatttataaaaatgaattaacaggtacgttttgtcttgtttagttttcaaagatcatttccgcttcgttcagcggctttaataatataacatcaagctcacatatttgtcaataacttttctcaaaattattttttggagctttttcatgtcagctgtttatcagcgacgaataacaatataacatgtttatttaattccggtcaaccctctttttaatttttttcttaagatgaattattgttatgttctattttaaacaagcataggatgaaaacaaagcagcatggacaaggaggagtttttctgtgaaccatttttatgtgtggcatatcaaacggattaagcagctaatcattattatgatagccgcttttgcgacagcaagttttttttatgtgcaaaacctgctccctcttcctgtgttttctacagaaggcggagcaaaagcggtatatagaggagattcagatacaaatgaagtagcccttacatttaatatcagctggggagatcaaaaggcaatgcccattttagacacattaaaagcaaacggtattaaagacgcgaccttttttctatcagcttcatgggcagagcgccacccggatgtcgtagaaagaatccgtaaagatggtcaccagatcgggagtatgggctatgcttataaaaactattcgcaaatgaagaaaagcgagatcaaaaaagacttagcaaaagcacgacactcctttcaaaaactcgggcttgacgaccttacgcttttaagaccgccgaccggccagtttaataaagacgtactcgatgttgctaaacagtacggctacaccgttgttcattatagtattaactcggatgactggacgaacccgggggttcaaaagatcgtccaaaacgtaaatggaacggtaaacgccggtgacatcgtgctctttcacgcttcagattccgccaaacaaacaaaagaagccctgccagagatcgtgcaccatctcagaagcaaggggctcaaaaacgtaacagtcagcgaattaatcgcaaatacggatgcaaaatcttcagaagtaaagtagcagccggtctaagcgcgtgcctgaaattttggcagcattaaaagctgaaaagcgttgcaggctaataaaggaagcagcattaaatagagccagtcctcttcattgacccttaacgccgggaaccactccatcacagtaaaaacaaacattagaaataatgcggaaacgaacgtttttttagaggactgtttttgctttgcataagcggccgcaatgcctaccgccaaaataaagagcggcagccaaatgtacggaatgatggagcctccatctttttcaaaaaacagaaagcgcaagtaaaccaagtcaaacgcgacaaatataatcaaaaacagctgaatcgaattccacaaagaatgagatctgaaaatttccagtgcaaagcggtgaatcgttaagaaaatcacaaatcccatttgagcaatcacgctaaagatcatgccaaccccgataaaccagaaaagaacagacagaatctccaatacctcgaaggaaagaaacagctccttatatcttccccactctatggcaaaaccgacaatacttgtagtcaaagctccgacacccaatacggaaaagaaaaatcggacgagattacggcttttcattgtagacttcccaacccctaaataaaccgctgtaacagcgatattttgttatgtataaatttttaaaagacattcatattaaaggtaagacgagttttcgaaaggagcttaagcatgttcaagaccgcaatgctatcgataagctgttttctgtttctatctgtaacagcttgtgctcccacggaccaagcagctgagatggactatgatcaaaccaaaaaaatggttgtcgatatattaaagacagatgacggaaaaaaagcgattcaagaaatattaaatgatgacaaattaaatgaaacacttgtaatggatgaaaaaactgtcaaagaaaccgttgaaaaaacaatgacctccaaaaaaggagctgaattttggaaaaaagtctttgaagatccaaaattcgctgaaggctttgccaaaacacttcaaaatgaacatgaaaaagtgctgaaaaaactgatgaaagatcctgagtaccaaaaaatgctgatgcaggtcatgcaggatcctgaaatggccaaaaaatacggtgaacttgtcagaagccaggaattccgaagccacctgcaggaagtcatatctgacactctgacaagccctctttacagaaagcagtttgaagaggaactgaaaaaagctgctgctgaaagcatgaaagaagaaatgaaaggcggcgaagaaaaacaaagctgagccgcttttcattccctaaaagcttcttctgcggaggaagctttttttgctctttaagcttttgcgccaatgctttcgtcgatttttttggcgatatccaaataaatggcgccggtcgggtggctttcatcataaacggacggcgcaaattcgctgtcatcccaatccggctgcttcagcggaattttgcccagaattggaacgcctagttcctctgcgagcttttcgcctccgcctttgccgaatacatattctttctcgcctgttttgacgctttcgtaataagccatattttcaacgatccccacgatttcatgatcggtcttcaaggccatcgcgcccgctcttgcagcgacaaacgcggcagtagggtgcggcgtcgacacgatcacctctttgcagcttggaagcattgagtgaacatcaagcgctacatcgcctgttcccggcggcaggtctaagataatataatcgacatccccccattcaacctcatggaagaagttattcagcatttttccaagcatggggcctctccaaatgacaggggcattgtcttctacaaagaatcccatcgaaatcactttgaccccgaatctttcaaccggcacgaccttttctccttcgatcgtcggccgtacagtgattcccatcatatccggaacactgaaaccgtaaatatcggcgtcgattaatccgactttctttccgattcgcgccagggacacagccaaattgaccgacaccgtcgacttgccgacgccgcctttgccgcttgccacagctaaaaacacaggctgtttttcactattcagcagagattgatcctgccctttggcagactcttgataactcattacgacttcttcgggcagctcctcaaaacgcaggccgaccgtctctgcaccggcttctttcaaccgtatgacgatttcctgctgaagctgcatttgttcggcagatcccgtttttgcgagcgccacctttacgctgacgtgccgtttttcgggttttattttaatttcttttacggcatccagctctctgagcggcttgtgaagaaatggctcgtccaaatcgccgactatcttttttacatcgtcttctcgcaacattgatctcaccctttgttgtattcgtttacaaaataagtatagcatatctttccttatagtgtctttgacacaaaaagaaaccctcttattcaggagggtctctgtcttctgtaaagtagcgcaatacgcctttataaacggatgctgcgattttgtcctgatatttgggcttggccagctgttttgcctcttccgggttagacaaaaacccgatttcgacaagggccccgggctttttaacattttgcatcaaataaattccgtgtatccgctttgccttccgcgtcgtgttttcaagattatgtcttaattcatcctgaataaacttggcggcccgttcattctcttcatattgcccgtaatagaagctttgcgcaccgctccatcgcgcggaaggaatcgcattcaaatggatgctgaggtaaagatcggcttcagaattgttgatcatatcgaccctcttccgcaagtcttcagcttttcttctgctgagtcccctcgtttcttcaggagcgagatcatgatcgtcctcccgcgtcagcatcaccaaggcgccctgctcctggagatagtccctgattcttagggatacttcaagagccacgtctttttcaaggagttcaccgcttgatgcccctccatcggcgcccccgtgtccaggatcaatataaatgattttgccgctcagcggaagattccatgaccgccaagaatcatcattgttgaattgatattgaaataaacataataaaacgacaaagccgagtaaaaacccgagccattttatttttttcttcatccctttccctcccgctcgtccttactacaagatatgggacaaggaaaggaaatatgattaagcttggcctcactttttcataaaactttgttttatctgagccgaagcttaaagcgtctttcccgctggctgaagccttccttccaccagctttggatgaagtattcgcaggcataatagagcggttcataagcagcttgaacattaaaagcctcagaccagctgacagcatattcataaagctcgtgcagtagctgtttttcttctttttctgagcggatcatcgctcgatgaacgggttctccgtgatagccgaacttcccgtactcggctcccagcaaatatgcctcaatggcaaagtcgatgcagccgtcatataagatatccgtatgcttagaaaaaaagtgaaaaagaggagcaaagcattcctctgcagaattcagcattttttccaaagacagttcgcgcagaagctgtttttccaaattgatctgcttcttttgtttttcattgttaaaagatacgaccgtccccatagaaaccgcctcctttttaccttgtattgtgcagtcaggagccggaaatcatgctcttctaaggaagggaaacggaggaagaagccgaaaatattagaagaggtgagatgagtgaaaggattgtttcaatataattgggaagttcgacatgcatggtttaagtggtgcctcagccagccgcaagaggagctggtcaagaagcgttcaggcggaatgggaagcattaagaaaaatctgtttcatattgtagatgtggaagtaagctggatctacgccattttagaaaaaccggatattcaacctgattactctcattaccagacgattcagcagatcgctcggttttccgacctgcaccgctcagaaatagaaagtgtaatttttaattattccagcgccttcgaacatctgccggttaaagcggcttggtcagacgaagtctgtacgcaaggcgatattttaaggcatttaatcgcacacgagatccaccatatcggccaaatctccgtctggacgagggaatcgggctctgctccagtatccgcttcatatatagggcggaaaatataataaaaaaactcccaaaccaaatggcttgagagtttttgaaacgccagaaattaacgttttgagaactgaggtgcacggcgtgcgcctttaagtccgtattttttacgctctttcatacgtgcgtcacgagtcagtagaccggcacgttttagagttgaacggtattccggatctgcttcaagcaaagcgcgggcgataccgtgacggattgctccagcttgaccggagaagccgcctccatgtacgtttactaaaacgtcataagtaccagctgtttcagtcaaagttaatggttgtttgatatcttcgattagagctgcagatgggatgtgctcgctgatttcacgattattcacgatgatacggccttctcctggaactaaacgcacgcgcgctacagagcttttacgacggccagtaccgtaatattgaacctgtgccaaattggtaacctcctttttaattaaccgcgaagttcgtaaacttcaggtttttgtgcttggtgtggatgctcagaaccacggtatacattcaattttttgaacatttgacgacctagagaaccttttggaagcatgcctttgatcgcaagttcaagcattttctcagggtagtttgtacgcatttcaagagcagttcttgattttaaaccgcctggatgttgagtgtgacggtagtagattttgtccgttaactttttaccagttaactcgattttttcagcgttgatgatgatcacatgatctccagtgtcaacgtgtggtgtgtaagttggtttatgttttccgcgaaggatagatgcaacttcagtagaaagacgtcctagcgtcttgccagcagcatcaacaactaaccacttgcgttcaatattacttgcgttagccataggtgttgtacgcattaaatttccctcctaaatgatctgccattttcaataaacttcaattacgttctatttcaaaacacaataagtttccggggcttatcgtggggttgaaatacataccatatgatatcttataactttctgtactctctgtcaagaaaatgttacacctggtttagttgtcatagataacacgccataaatataagccgtgtgccggtgcagtgcgccctgcggcatcgcggtttttggcaagaatcatcttttcaatgtcaccaggggaaaatttgccggttcctacatcaagaagcgtaccggcaatgattctaaccatgttatacaaaaatccgcttcccacaattctcatctgcagtccgtcccctgtgtcagaccattccagttcatggaccgttctgactttatccttcacttcggttttggtcgcacaaaagcttgtgaagtcatgggttccgaccagatagcgggaggcttccttaactttctccatatcaaggtcataaggaacatggtatgcatagtagcgtttaaaaacgtccggatgtctgcccctgtatatcatataccggtattcttttcttttcgcagaaaacctcgcatgaaattgatcattgacagcttccgccttgcggaccgatatatcatcgggcagcagggcattcaatgcatacggccatttcgcctcaggaatggatagcggactgtcaaaatgaatcgtctgtccgactgcgtggacgccgctgtcggtgcgcccggatgaaacgacaggaatacgctccttcgctttatggagcgtttgcagcgctttttcaagctcatcctgaatcgttctttgcccaggctgcacttggtagccgtaaaaaaggtgtccgtcatatgaaatcgtgcacttcattctcatcgtccatcacctaagtccgcaataaaattagcaaaacgccaagaacagctaaaatgaggagcacggaagtatccttccatttccatgtcagctgcctgtattttgtacggccttctcctcccctgtatcctcgcgcctccatcgcggttgcaagctcttcagctcttttaaaggcactgacaaaaagcgggacaaggagaggaacgatcgctttgacgcgttctttgaccgggccgttcgcaaaatcgacgcctcttgccatttgcgctttcatgatcttatccgtctcttcgatcaaagtcggtataaatctgagggagatggacatcatgagagcgagttcatggacgggaagcttcaattttttaaacggaccgagcaaatgctccaaaccatcggtcacttcgattggagtcgtcgtcaatgttaaaatcgttgtgatcatgatgaggtaaacaaagcgcagagaaataaaaatcccttgaacaagcccctgttcataaattttaaacaggccgagatcggcgagaaccggtccttcccttgtcataaaaatatgaagcagaaacgtaaacagcacaatccagaacaccggcttcattccttttataaggaatcgcaccggaacgcctgacaaagcggcggctgcaaccgtaaacaggccgagcaatgcatatgtttccgtattattcgcgaaaaaaacgataaagacaaaaaggaaaatggttaacagctttgtacgcggatcgagccgatgaatgaccgatttcccgggtacgtatttgccgataatgatattgtccatcatagggcattttcctcctgaaaaagagctttaacttcggaggctgcttcttcaatcgtcaaaatcggcgctttgaacgtaatccccagcgtctcttcaaggcgtttttggaatttaatcgtttccggcaaatcaagccctaaagcggcaatgtcgtctttccttgaaaaaagctcccgcggcgtcccttttgctttgaccgtccctttatgcatcacaatcagttcatctgcatacgctgccgcgtcttccatactgtgggtgacgagaattgtcgtcaggttcctctgcttatggaggctgtagaacatgtccatgatctccttgcggcctcttgggtcaagccctgccgtcggttcatcgaggacaagaacctcaggctccatcgccagcactcccgcaatggccacgcggcgcatttgccctccgcttagttcaaacggagacctgtcggacagctctgcacccaaacctaccagcttcagcatttccctcgctttttcttccgccttttcccggctcatgccaaagttgatcggaccgaatgcgatatcctttaaaattgtttcttcaaacagctgatgttcaggaaactgaaagacaatgccgacctttttccgcaaagcttttagatgtttattctttttgcctgcttcaagaacgtcctcgccgaggcgtatctgtccttttgtcggttttaaaagcccgttcaggtgctgaagcaaagtcgattttcccgatcctgtatggccgattacggcgacatagcttccttctttaatcacagcgttgacatcatagatcgccaggcgttcaaaaggcgttttcatctggtatcggtgctctacatctttgatttcaatgtccatagctcattcaccaatccttcttgtgtcagatgatcgcctttcagagccagaccgctttccttcagcatttgggtgagctgaaaagaaaatggcaaatcaagcccgattttaatcagatcttgattcagacgaaagacttcctgcggcgtgccttcggcaaattttctaccgctgttcatgacgatgatccggtcggccttcgcggcttcgtttaagtcatgggtaatcgaaatgaccgtaaccattccttggtctttcagccttctgaccgtatccagcacttcttcccgccccatcgggtcgagcatggaagtcgcttcgtcgagaatcatgatgtcaggccgggcagcaagcactcccgcaatcgcaacacgctgcttttgtcctcccgagagatggtgcggctcttgatcgagaaattcttgcatgttcacctgttgaacggcccaatccaccctttccaccatgtcttctcttggaactccgctgttttctaaaccaaaagccacatcatcgcggacggttgtcccgacaaattggttatccggattttgaaacaccatgccgaccttttttcggacatcccagaccgtctcttccgtcagcttgataccgcctactttaatcgatccttcatcaggcagaatcagtccgtttaaagcacgggcgagcgtcgactttcctgaaccgttgtgaccgacgatcgcaagccattctcctttcgacacatggaaagatacgtgatcaagcgcaggcctgtctgcatctttctggtagcgaaacgtgatatcttctgcagcgattaatcgctcttgattcatttgcccgtccggcctcctctcctctaaagctctgcttttctgactattcttttatcatagaaaattccccggtatctaaaaaaagggcatagatccagttaaaaactgtcccgcccttctttagacacacaaaatatgtgattaaaccaattcgatgatagccattggtgctccgtcaccacggcgaggaccaagcttcataatacgtgtgtatccgccttggcgctcttcataacgaggtgctacatcagagaaaagtttttgaagtgcatcttggtttttctctgcatctgcaacctcattgcggatgtatgcagctgcttggcggcgtgcgtgtaaatctccgcgcttgccaagtgtaatcattttttctacaacagagcgaagttctttcgcgcgagcttctgttgtttcaattctctcgttgatgatcaagtctgttgtaagatcacgcagcattgctttacgctgtgcactagtgcgtcctagttttctgtatgacatgtggtgtcccctcctttattgaaatactctatctgaaataaaaaacacacgaaaatcctagttcacatggaaactagtcaatcgtctttgcgaaggccaagtccaagttcttcaagtttcgcttttacttcttcaagcgacttgcggcccaggttgcgaactttcatcatatcttcttcagttttgttcgcaagttcttgaactgtattgattcctgcacgcttcaagcagttgtaagaacggactgaaagatcgagttcttcaatagtcatttcaagaactttttctttttgatcctcttctttttctaccatgatttcagcgtgctgagcttcgtcggtcaaaccgacaaaaatattaaggtgttcagtcaaaatctttgaaccaagtgcaatagcttcttttggtccagtgcttccatctgtccatacgtcaagcgtaagtttgtcatagtttgtaatctgacccacacgagtattctcaacttgataagatacgcgagaaacaggtgtaaagatggaatcaatcgggatgacgccaatcggctgatcgtctcttttattcgcgtcagctggtgtatacccgcgacctctttgagcagttaagcgaactcgaaaactcgcattttggccaagagtcgcaatgtgaagatcaggattcaaaatctcaacatcactgtcgtgggtaatatcagcagctgttacaactccttcaccctgaacatcaatctcaagcgtcttctcttcttcagagtagattttcagtgcaagttttttaatgtttaagataatcgttgtaacatcttcaacaacgccttcgatcgtcgagaattcatgcagtacaccatctatttggatcgatgttacagcggcaccagggagtgaggataaaaggatacgacgtaaggagttacccaaagttgtaccatatccacgctcaagtggctctacgacaaatttaccatacttggcatcgtcgctgatttcaaccgtttcgatttttggtttttcaatctcgatcatttcataaaaccctccttcaaaacgtcgaaaccccggaaagaatttctctgattctatccgaaattccccattgtttagtcccgtatgtgctcaggcaacgagtgtgcattcgttttataaattaactgtatcataacccattattgacagggacacaaaatctatacaaacaaattacacgcggcgacgttttggcggacggcatccgttatgaggaacaggcgttacgtctctgatcgctgtaacttctagtccagcagcttgaagtgcacgaattgcagcttcacggccggaacctggtccttttacagtaacttcaagagttttaagtccatgttcgatagaacctttagcagctgtttcagcagccatttgtgcagcgaatggagtggattttttagaacctttaaatcctaaagctccggcacttgaccaagaaagagcattgccatgaacatctgtgatagtaacaatcgtgttgttgaaagttgaacggatatgagcaattccagattcaatattctttttcacgcgacgtttacgcgtgtttgttttacgtgcagcagccattgtttaattacctcccttgcttattttttcttgttagctacagtacgacgcggacctttacgagtacgcgcgttatttttagtattttgaccgcgaacaggcaatccgcgacgatgacgaattccgcggtagcttccgatttcgatcagacgtttgatgttaagagacacttcacggcgaaggtcaccttctactttcaatttgtcgatcacgtcacggattttaccaagttcttcttcagtcaaatcacgaacgcgagtatcttcagaaactccagcttcttttaagatttgctgagccgttgtacgaccgattccaaagatgtatgttaatgaaataacaacacgtttatcacgtgggatatctacaccagcaatacgagccatctctctcgcacctccttaaaaattatccttgtttttgtttatgctttggattttcacagatcaccattacttttccttttctgcgaatgaccttgcatttttcacagatcggtttaactgatggtctcactttcatgtgtttccaacctccttcaatttccggagtgctttatttgtaacggtacgtaattctaccacgagttaagtcatatggagataattctaccgtaactttgtctccaggtaaaatgcgaatgaagtgcatgcggattttaccagatacgtgagccaaaaccgtgtggccattctcaagttcaactttgaacattgcgtttggcagcgtttcgactacagtaccttccacttcaattacatcgtctttcgccattcaagtgttctcccttcttcaaatcagtaacttgctctctgacaaatttcaaaagagaaaatctcaattttccgtttgtcacacgccctgtttcgtttatactgttctgaacttccggagatacgcaatcataaaaggttaaatgattgatattctttttcttaggagaatgaaatttacgcttttctccgtctgctaccagcacatgatgatgatcgactatatcaataacaactgcgtattggttcatttcgcggcctcttgtcatgcgtacgaactgtccaatttcaggtgttttccgatacatctcatttcacctaggcttttgtcagtatctcaaaaccggcatccgtaatggcaatcgtgtgttcaaagtgagcacacttcttcccgtccacagttacaaccgtccagttgtcagccaatgttttgacatagcgtgtacctgcattgaccatcggctcaatggccaagaccatgccaggctttaaacgcgggcctttgttcggcggaccgtagtgaggaatttgcggatcctcatgcagatcctgccctaccccgtgtcctacatattccctgacgactgaaaattgttcgctttcgacatacgtttgtattgcgtgggaaatattcgacaaacgttctcccggttttgcttccttcaagcctctatataaagactcctctgtcacatccagcagcttctgatcatcatcgctgatcgtacccactggataagtccaagcggagtcaccatgataaccgtttagcttcgcaccgatatcgatgctgatgatgtccccgtcgcgaaggactcgttttcccggaataccgtgcacgagttcttcgttgaccgaaacgcaaatgctcccgcgaaaaccattataccctttaaaagatgggattgcaccttgctttgtaataaaacgttcggcaatttgatccaattcttttgtcgagatgccgggtttaatgtgcttttttagctcctgatgagttaaagcgacaattcgtccggcctcccgcatgatttcgatttctcggggagttttacaaataatcatttgtcccggcctccgagaagctcctttatatcagcgtaaacttcattgatgtgcttctgcccgtcaatgtttacgagatatcctttatcttcatagaaatcgagtaaaggctgggtttgcttcatgttgacctctaaccgcgtggatacggtagcttcattatcgtcttcacgctgataaagctctcctccacacttgtcgcatacattttcttttgcaggcggattaaagactaaatgataagttgcaccgcagtttttgcagattctgcgtcctgtcagacgttccatcaatgcatctttatcgacttgaatgttgatgacatggtcaatcgacttgccaagtcctttaagaatttcctcaagtgcttcagcttgagcgactgttctcggaaatccgtccagaagaaaacctccgtcacaatcattcttgccaagtctctccctgacaataccaattgtcacttcatccggaacaagctcacctttatcaatgtatgatttggcttcgagtcccagatccgtttcttctttcatcgcagcgcggaacatgtctcctgttgagatatgaggtatcccaaaatcttcaacaatccgttcagcctgtgtccctttaccggctccaggcagtcccattaagactaagttcatttcggattccccgtcctctctattttagagggaatgggcgcgccccatttcctctagtgcttcataaatccacgatagtttcgttttaccagctggctttcaagctgcttcattgtttcaagtgcaaccccgatgacaatcagcaaacttgttccaccaatttgtgcagaagaaggcagcccagcaatattaacgaacaagacaggaagaatggcaatcacggccaagaatatggagcctacaaatgtaagtcgatacaaaatgctcgtaattctatcttgagtcatttttcctggacgaactcccggaatatagccaccttgttttttaagattatcggccatttgctcagggttaacctgcacaaatgcatagaaataggtaaaggcgatgatcaatgctgcataaactcccattccgaccggatgcgtgtaatcaaacgttttttgaatccaattcgtgacgtcattggagccaaagaatgttgccacggtccgcggagtggtgataaatgctacggcaaagataaccggaataactcccgccgggttaaccttcagcggcaagtgtgtagactggccgccaggaaccggtgaacggcctgaacctttcgcatattgaattgagatttttctaaccgcctgttggatgaaaataacgccaacgacaatcgctaaaatcgcaaccaatataacgacaacctttatgatttgcaagaataactgatctccagcatctacaaactgctgagcgtagatctgattaatcgtctgcggaataccggcaacgataccggcgaagatgataatggatattccgttaccaactccatgagacgtaatttgttctcccagccacattaaaaaagcagttccagcagttagtacaatcgcaataagcaaataagtaccgactcccgggtctgtaatcaacgcgccgccggccatgttgttaaacccgtaagacatacctaaagcctggataaatccaagaacgatcgtgaagtaccttgtgaactgagctagttttcggcgaccaacttccccctgcttagaccattcggtaaacttcggcacaacatccatctgcaggagctggatgatgatagaagctgtgatgtaaggcatgattcccatcgcaagaatggagaagttgaacaatgcaccgccgccaaatgtgtttagaatcccaaatacgctcatttgatcctgtgcctttaaaacttctgtgtttacgtgcggcacaggaatgaacgaaccgagacgaaagacgataagcattaaaagagtgaagataatcttattccgaatatccttcacacgcataaaattggagattgtcttaaacaagttagatcacctcagctgtaccgccagcagcctcaattgcttgtttagcagaagcggagaatttattggctttaacagttaatttcttttctaatttaccgtcgccaagaattttcactccagatttcaacttgctgattacacctgtttctaaaagaagttcaggagtaacttccgtcccttctgcaaagctgttgagtttgtctaggttgaccacagcgaattccttgcggttgatgtttgtgaaaccgcgtttaggaagacgttggaataaaggcatttgtccaccctcgaatccaggacgtacaccgccgccagaacgagcgttttgacctttatgacctttaccagctgttttaccgttaccagaaccaataccacgacctacgcggttgcgcgttttacgtgaaccttctgcgggctttaattcatgaagtttcatttggacacctccttagcctatcgtttatttttaaagttctttaacagaaactaaatgagatactttgttaatcataccgcggattgcagcgttgtcttcatgaacgacagtttggtttgttttctttaaaccaagcgttcttacagtaatgcgctgatcttccgggcgtccgattacactgcgtttgagggtaatttctaatttagccattaatgttccctccttatcctaacagttcttctacagattttccacgaagcttcgcaacgtcctcagcgcgtttcagctcgcttaaaccttggactgttgcacggatcatgttgatcggtgtgttagaacctaaagacttagaaaggatatcagatacacctgcaagctcaagtaccgcacgtactgggcctccagcgatgactcccgtaccttcagaagcaggttttaacaagatgtttcctgcaccgaaacgtccgatgatttcgtgtggaattgtagttccaaccattggtacttcgatcaaattctttttcgcatcttcaacagctttgcgaatcgcttccggaacttcttgtgctttaccagttccgaaaccaacgtgaccgtttttgtcaccgacaacgactagagctgcgaaacggaaacgacgaccacctttaacaactttcgctacgcggttaacggtaactaagcgttcttctaactctaatttgcttgggtcaatacgacgcatattcatatgtccctccttcttttattaaaattctaatccagcttcgcgtgcagcatcagccaatgcttttacacgtccatgataaaggtaaccgccacggtcgaacacgacatttgtgatacctttttcagaagcgcgctttgcaacaagctctccaacttttgcagccgcagccgtatcgctgccattttcagcgttaaagtctttatcaagagtagatgcactcacaagtgtaacaccgttcacgtcatcgatcacttgtgcgtaaatatgtttgtttgaacggaaaacatttagacgaggtctttcaggggttcctgaaagcttcgcacgaacacgagcgtgtcttttaagacgtgcagcattcttgcttgttttcgtaatcatctgggtcactcctttctcacattaagcggttttacttagcagatttaccttctttacgacgaaccatttctccttcatagcggatccctttgcctttgtaaggctctggagaacgtacagcgcgaatgtttgcagcagtagctccaacacgttctttatctgtaccttttacaaccacttttgtttgagatggaacttcgatttcaattccgttttcaggaacgatttctacagggtgagagtatccaacgttcaaaacaagtttgtttccggatttagaagcacggtaaccgacaccgactaattccaaacctctttcaaaacctttagatacaccttcaaccatgtttccgatgatgctgcgagttgtgccatgcagcgcacggtgttctttattatctgaaggacgttctacagtaagtacattgtcctcaattttaatcttcatatcaggatgaaacgtacgagttaattctccttttggtcctttcacggttacagtgttgtcgttcagagtaactgtaacgcctgaaggaatctcaagtagcttcttacctacacgagacataccaaacacctccattcatgttaaacttcttaccaaacgtatgctaatacttctccgccagcctgtttagcgcgggcttctttatccgttaacacaccttgtgatgtagaaagaattgcgattccaagtccgttaagcacgcgaggcacttcgtttgacttagcgtaaacgcgcagacctggtttgctgattcttttaaggccagtgatgacacgctcgttgttttgtccgtatttcaagaaaacacggatgatgccttgtttgttatcttcaatgaattctacgtcacggatgaaaccttctcttttcaagatttcagcgatctctcttttcaacttagaagcaggaatttcgagcttctcatgacgtaccatgtttgcattacgaatacgagtcagcatatctgcaatcggatctgtcataaccattatttaataacctccttcccataaacggggattaccagctggcttttttaacgccaggaatttgtcctttatatgcaagttcacggaaacaaatacggcaaagtttaaatttacgaataacagagtgcggacggccgcagcgttcgcagcgagtgtactcttgtactttaaacttcggtgtgcgtttttgtttcgcaatcattgactttttagccacgatttcgcctccctttcattgattatttctggaatggcatacctaattgagttaacagttcacgagcttcttcatcagtgttggcagtcgttacaataacgatatccataccgcgaactttagttaccttatcatagtcaatttcagggaagatcagctgttctttgattcctagtgtgtagtttccgcgaccgtcaaaagatttttttgaaattccgcggaagtcacgtacacgcggtaaagaaacagaaattagtttatcaaggaaatcgtacatgcgctctccgcgaagagttactttcgcaccgattggcattccttcacgaagacggaatccagcaatagatttcttcgcacgagtaacgacaggtttctgaccagcgataaacgttagttcttcaacagcgctatcgatagctttagcgttttgaacagcgtcaccaacacccatgttgattacgattttttcgattttaggcacttgcatcacagatttgtattcgaactttttcattaatgcaggtgtaatttctttattgtacttttctttaaggcggttcatgagatagacctcccttcctttattactagttatctagaacttgcccagatttttttgcaatacgaacttttttgccattttctactttgtatcctacgcgagtcacttcacctgttttaggatcgagcggcattacgtttgacacatgaattggcgcctcttgatttaaaattccgccttgagggtttgcttgagtcggctttgagtgcttcttcaccatgttgacaccctcaacgattacgcggtcttttttagggaaagctgcaagaattacaccttgcttccctttgtctttaccagagataaccattactttatcgccttttttaacatgcatcctgatcgcacctccttagtccggcattgatatcattaaagtacttctggagctagagaaacaattttcatgaagttgttatcacgaagttcacgtgctacaggtccgaagatacgagttccgcgcgggcttttgtcgtcacggatgataacacatgcattctcatcgaatttgatgtaagatccgtcatttctgcgtgcaccgctcttagaacgtacgactacagctctcacgacatcaccttttttgacaacgcctcctggtgttgcttgtttaaccgtgcaaacaatgacatcaccaatgttagctgttttgcgtccagaaccaccaagcaccttgattgttaacacttcacgggcaccagagttatcagctacttttaaacgagtctcttgttgaatcattatttgttacctcccttcggaaaaaagtttccgaactttattagataataacagcttcttcgacaacttcaactagacgaaaacgtttagtcgcagataatggacgagtttccatgatctttacgatgtctccgattttagcttggttattttcatcatgtgctttgaattttttagagtactttacgcgtttaccgtagagtgaatgctttttgtatgtttctacaacaacagtaatggttttatccattttgtcagaaacaacacgtccttggtagactttgcgctgattgcgttcgctcatgttttagagaacctccctccggaattatttgttggcagcaatttctctttcccgaatcacagttttcatgcgcgcgattgacttgcgcacttcacgaatgcgagcagtgttttcaagttgtcctgtcgctaattgaaagcgaagattgaaaagttcttctttaagagactttactttttgttcaatttcagcagtggtaaggtcacgaatttcattagctttcatttgattcaccaccaatttcttcacgttttacgaacttcgttttaattggcaatttgtgagatgcaagacgaagagcttcgcgagcgacttcctcagacacaccagaaatttcaaataaaactttgcccggttttacaacagctacccatccttcaggagcacctttaccggaacccatccgaacctctagaggcttagctgtataaggcttagaagggaaaattttgatccaaactttaccgccacgtttcatgtaacgagtcatcgcaatacgtgctgcttcgatttggcggtttgtgatccaagaagattcttgagcttggataccgtattcaccgaaatgcacttcagtgccgcctttcgcacggccgcgcatttttccgcgatgctctctgcgatatttaacgcgttttggcattaacatattattttcctccttcctcagttttcttcttagtaggaagaacctctccacgatagatccagacttttacaccaagcttaccgtaagttgtgtcagcttcagatgtagcatagtcgatgtctgcacgaagtgtgtgcaatggaacagttccttcactgtagtattcagaacgagcgatgtcagcgccgccaagacgaccggaaaccattgttttaattccttgtgcaccagcgcgcattgtgcgttggatttgttgcttttgcgcacgacggaaagagatacggttttccaattgacgagcaatgttatcagcaactagctgagcatcaagatcagctcttttgatttcaagaatgttaatgtgtacacgcttgccagtaaggctgttaagggctttgcgaagcgcttcgacttcggaaccgcctttaccgataaccataccaggcttagctgtgtggatcgtaatatttacacggtttgccgcacgctcgatttctactttagaaactgaagcgtcagacaggcgttgattaataaattcacggattttcagatcttcgtgaaggaagtcagcgtaatctttgccagcgtaccacttagattcccaatcacgtataaccccaatacgaagaccgactggatttaccttttgacccacgagttatccctccttcttttctgatacaacgatagtaatgtggctcgtacgtttgttgatttggcttgcacgtcccatagcgcgcggacggaatcttttcaacgtagggccttcgttcacgtaagcttgagtaacaaccaggttgtttgcatccatttcgtagttgtgctcagcgttggcgatagcagattttaaaactttttcaataatcggggaagcagcttttggcgtatggtttaagatcgatactgcttcacctacttgcttgcctcgaatcaggtccattactagacgtgccttacgaggagcaatacggactgttcttgcgacagctttagcttgttgcatttaaaagcctcctctcattagcgtcttgttttcttgtcatcactagcatgacctttgtaagtgcgagtcggtgcgaattcacccaacttgtgacctaccatatcttcagagatgtaaacaggcacatgtttgcgtccatcatagactgcgattgtgtgaccgataaattgcgggaaaatagtagaacggcgagaccaagttttcacaacttgtttcttatccgcttcatttaatttctcgatttttgtcattagatgatcatcgacaaatggtcctttttttaagctgcgagccattttggaacctcccttcgtgattgcactacggtccgatatgaaccgtagacaaccccgttatttatttttacgacgacgtacgatgaatttatctgatttgttctttttcttacgagttttgaatccaagagttggtttaccccatggagacataggtgatttacgtccgattggagcgcgtccttcaccaccaccgtgcgggtgatcgttagggttcataacagaaccgcgaactgtagggcgaacgcctttccagcgagaacgtccggctttaccgatgttgatcagttcatgctgttcgttacccacttgaccgattgttgcgcggcaagcagaaagaatcatgcgaacttcaccggagttaagacgtacaagaacgtatttaccttctttaccaagaacttgagcagatgtaccagctgaacgtacaagctgtccgccttttccaggttttaattcaatgttgtgcacaactgtaccaacagggatgttgatcagtggaagtgcgttacctactttaatgtcagcttctggacctgacatgatttcagtgcctacttgaagccccttaggagctaggatgtagcgtttttctccgtctacatagttaattagagcaatgttagctgaacggtttggatcgtactcaactgtagcaacgcgtccaggtataccatctttatcgcgcttgaagtcgataatacggtattggcgtttatgtccgccgccttgatgacgtacagttaatttaccttggttgttgcgtccgccttttttgtgaagcggggcaagcaaggatttttccggctgatctgtcgtgatttccgcgaaatcagaagaagtcatgccgcgacgtccgttagaggtcggtttgtactttttaatcgccattttgaatttccctccttctttttacaagtgattaagcttcaaaaatttcgatttctttgctgtcttcagtaagcttaacaatcgcttttctgcgtttgtttgtcataccagagtagcggccgacacgtttgaatttccctttgtagttcatgatgttgactttttcaactttcactccaaagatttgttcaacagcgtctttcacttctgttttgttggcttttacgtcaacttcaaacgtatattttttttcagtcattaaatcagcagaacgttcagtaatgacggggcgctttagaacatcacgaggatctttcattatgcaagcacctcctctactttttcaaccgctgctttcgtcatcacaagcttctcgtgaccgacaacatcgaggacgttgattccgttagcttcaacaacagtaactcctggaaggttgcgagcagatagttcaactgtctcgtttgcatccgcagttacgattaaagctttcttctcgatagacagacctttaaggatagctgccatttcttttgttttaaccgcatcaagattaagatcttcaagaacgatcaagttgttgtcattcactttagaagacaatgctgatttgatagccaagcggcgaacttttttcggtaatttatatgcatagctgcgtggtgtaggaccgaatacgataccacctccgcgccattgcggtgaacggatagatccttgacgagcacggccggtacctttttgacgccaaggtttgcgacctccgccacgtacttccgaacgattttttactttatgagttccttgacgcaaggaagctctttgcataagaatagcgtcgaatactacgctctcatttggctcgattccaaatacagagtcgtttaattcgatatcaccagcagtagaaccgttttggttatataaagctacttttggcatgatcaatttcctcctttcctaagagaattatttagatttaacagcacttttaacagtgactagtgattttttggcaccaggaacgttacctttaactaaaagaaggttgcgctctgcatctacttttacgatttcaaggttttgaacagtgatttgctctccgcccatacgtccaggcaacagctttcctttgaatacacggttagggtctaccggtcccattgaaccaggacggcggtggtagcgtgaaccgtgagacattggtccgcgagattgtccgtggcgtttgatagcgccttggaaacctttacctttcgatgttcctgttacatctacgatttctccgttagagaaaatatcaactttgacttcctgaccaacttcatacgcatccatatccactccgcgtaattccttaacgaagcgcttaggagcagtttccgcttttgcaacgtgtcctttttctggtttgttggcaagcttttcacgcttgtcgtcaaaaccgatctgaatcgcttcatagccgtcgttttcagaagttttcttctgaagcacaacgttaggagcagcttcgataacagttaccggaataagatcaccgttttctgcgaaaacttgcgtcataccaatttttcttcctaagattcctttggtcattcgtcacacctcctataaagatcattctatattttagattaaagtttaatttcgatatcgacaccagatggtaaatctaatcgcattagagcatcaacagtttgtggtgttgggttcacaatgtcgatcaaacgtttatgtgtacgcatttcgaattgctcacgagaatctttgtatttgtgcaccgcacgaaggattgtgtaaactgatttctcagttggcaacggaatcggaccagaaacgctggctccggaacgtttagccgtttcaacaatcttctcagcagattgatcaaggattctatgatcatacgcttttaaacgaatacgaattttttgttttgccattattttccctccttttcgcctacttacattagacaattctccgtgagaaaaacctgaatcaccttgccatggcaaagcggccgggtgtgtcagcaacctctcacttcatcgcagtcaaagaccaacatgcactattatacaaaatttataggcatgttgcaaggtaatattgaatattaccggcttttgcacactttttttattatacagattcaagcagtgttaatcaaggacttacaggcggaaaataaatccctttagcatagcggctcaaaataaaaaacgagacccggctggatctcgttttttattttataagtattattcgatgattgaagaaacaacgccagaaccaactgtacgtccgccttcacggatagagaagcgagttccgtcttcgatcgcgattgttgaaatcaattcaacagtcatttcgatgttgtctccaggcataaccatttctacgccttctggaagctgaatgataccagttacgtcagttgtacggaagtagaactgagggcggtagttagagaagaatggagtgtgacgtccaccctcttctttagaaagaacgtaaacttcagctttgaattttttgtgcggagtgattgtacctggttgagcaagtacttgaccgcgttggatttcttcacgagatacaccgcgaagaagtgcaccgatgttgtctccagcttctgcatagtcaagaagcttgcggaacatttcaacacctgtaacagttgttttcttgttttcttcttgaagaccgatgatttcaacttcgtcaccgactttaacttgtccgcgctctacgcgtccagtagcaactgttccacgacctgtgattgagaatacgtcctcaacaggcatcatgaatggcttgtcagtttcacgctctggagttgggatgtactcgtcaacagcagccatcagttcaaagattttttcttcgtactgagcatctccttcaagagctttaagagcagaacctttgataactggtacatcgtcaccagggaactcatactcagaaagaagatcgcgaacttccatttcaactagctcaagaagctcttcgtcgtctaccatgtcgcatttgttcaagaatactacgatgtaaggcacacctacgttacgagaaagaaggatgtgctcacgagtttgtggcattgggccgtcagcagcagaaacaacaaggatcgcaccgtccatttgcgcagcaccagtgatcatgtttttaacatagtcagcgtgtcctgggcagtcaacgtgtgcatagtgacggttgtcagtttcgtactcaacgtgtgcagtagaaattgtgataccgcgctcgcgctcttctggagcaccgtcgatttggtcgtatgccatagcagtacctttaccagatttcttatgaagcacagtagtgatagcagctgttaatgtagttttaccatggtcaacgtgtccaattgtaccaatgttggcatgtgatttggaacggtcgaatttttctttagccattctgaaaatcctccttaaaaaggttagtttttgttatatagagtgatagaaagtgaaagcaatgtttcactttctcatcttacaatagtagttatactttaatgaagaggcaaaatcaattattcaccttgattttttttgatgatctcatcagcgatgctcttaggcacttcttcatagtggtcaaagaccattgtgaacgtaccgcgtccttgtgtgtttgaacggagagccgtagcgtaaccgaacatttcagaaagtggaaccatcgcgcgaacgacctgagcgtttccgcgtccttccataccttctacgcgaccgcggcgtgacgtaatgtcgcccatgatgtctcccatgtattcttctgggataacgacttcaactttggagatcggctcaagaataactgggttacacttgcttgccgcgtttttaagcgccatggaagcagcgattttaaacgccatttcgttagagtcgacatcgtggtaagaaccgtcaaaaagtttcgctttgatgtcgataacagggtaacctgcgactacaccgttttgaagtgcatcttcaagtcctgcttgaacagccggaatgtattcacgaggaacgacaccaccgacgattgcgttttcgaactcaaagccttttccttcttcgtttggagagaattcgatccaaacgtgtccgaactgtccgcgtccaccagactgacgtacgaatttaccttcaacttgcgcgctcgcacggaatgtttcacgatacgcaacttgaggagcaccgacgttggcttcaactttaaattcgcgtttcatacggtcaacgatgatatcaaggtgaagctcacccataccgccgatgatcgtttgacctgtttcagggtcagtatgcgcacggaatgtcggatcctcttcagccaatttagccagtgcagtagacattttgtcttggtcagccttagatttaggctcgattgcaacgtggataacaggctcagggaattccattgattccaggataacaaggtttttctcgtcgcaaagcgtgtcccctgtagtcgtgtctttcaaacctacagcagcagcgatatcccctgcgtacacagtagagatttcttcacggctgttggcgtgcatttgcaggatacggccgacgcgctcacgtttgccttttgttgagtttcttacgtatgaaccggaatcaagtgttcctgagtacacacggaagaacgtcaatttaccaacgtaagggtcagtcataactttaaatgcaagcgctgagaaaggtgcatcgtcagaagactcacgagtaacctcttcatcagaatcaggcagagtacctttgattgctggtacgtcagttggagctggcaggtagtcaagaactgcgtcaagcactaattgaacacctttgtttttgaaagctgaaccacatagaaccggatagaactcaacgttacaagttcctttgcggattgctgctttcagctcgtcaactgtgatttcttcaccttccaagtacttcatcataagctcttcatcaagctcagcaacagcttcaatcaagctagcgcgaagctcttcagctttgtctttgtactcagcagggatttcacgcgcttcagagcgtgttccaaggtcatcttcatagtagtacgcaacgttttctacaaggtcgatgatcccttcgaaattgtcttcggcgccaatcggtaattggatcgcgtgagcgttcgcctcaagacggtctctaagagttcctacagagtaaaggaagtccgcacccgttttgtccatcttgttgacaaatacgatacgaggtactccgtaagttgtcgcctgacgccaaactgtttcagtttgcggctcaacgcctgattgtgcgtcaagaacggcaacggcaccatcaagtacgcgcagggaacgttcaacctcaactgtgaagtctacgtgtcctggtgtgtcgatgatgtttacgcggtagcctttccactgtgcagttgttgcagcagatgtgattgtgataccgcgttcttgttcctgctccatccagtccatttgggaagccccttcgtgagtttcaccaattttatggatacggcctgtgtagaacaagatacgttcagttgttgtcgttttaccggcatcgatgtgagccatgattccgatattacgagttttttctaaggagaactctcttgccattgggtcttttctccttccttcttagggaataatattttgtcgtgtgagattaccagcgatagtgagcgaacgctttgtttgcttcagccatcttatgagtatcttcacgtttcttaacagcagcaccagtgttgttagctgcatcaaggatttcgttagctaaacgctcttccatcgttttttctccgcgaagacgagcgtagtttactaaccagcgaagtccaagagtcgtacggcgttcaggacgaacctctacaggtacttggtagttcgcaccacctacgcggcgtgctttaacttcaagcactggcatgatgttcttcaatgcttgttcgaaaacctccattgcatcgttgccggtacgttctttaataatatcgaatgacttgtataggattgtttgagctttaccttttttaccgtcgatcatcattttgttgatcaaacgagtaaccagtttagagttgtaaagcggatcaggtaaaacgtctctttttgctacaggacctttacgtggcatctgattatcctcccttctcttgttacgggtttacagcaagcagagggatttcacggttcagctgccgggatcaaactgacgcttggcgcgaaaagcccgacgcccttaacagcattgccagaactccttgcttttaaaaacccttttatttgtattcaaacggaattattttttcttaggacgttttgtaccgtatttagaacggccttgtgcacggttttcaactccggcagtatcaagtgcgccacgcacgatgtggtagcgtacccccggtaggtcttttacacgtccaccgcggatcaatacgacactgtgctcttgcaggttgtgtccgataccaggaatgtaggctgtaacctcgattccgttagttaagcgaacacgggcatatttacgaagcgctgagttcggcttcttcggtgtcattgtaccaacacgggtacatactccgcgtttttgtggtgaagatacgttagtgtgctctttcttgaagctgttgtatcctttgttaagtgctggagacttagaagtttcaactttgcttacgcgtcctttgcggactagctgattaattgtaggcattttgtatttcctcccttcattacgttttataacccacatacccaggtggttcatttaaaagcaaaaaacaatgcctttgcataaaagcaaaaacaacgagtacgttattgaataatggcaacagctgcagctccgacttcaattccgcaggctttgccgagctttttcatggactctgccattgagactggaaccccttgttcatttgccagattgataacacctgacgtcagacaaggatcagcgtcctttgctacgacgacttccttaacagaattgcgcttcagtgctttgactgtctgcttcgtaccgataataatagattgagcctgtgatactttatcataagacatcatatatcctccaaagtaacaggtttaaattgagcaccttggttatattatcatcctgaaagaaggatgtcaacatatgatgacaatttttagtgacatccttctttaggattttttatttattcagccggaaccatttcatcagatgattggacttgcaataccggcttcactttacgatagttcagcatacccgttccagcaggaacaagcttaccgatgataacattctctttcaggccgagaagctcgtcacgttttcctttgatcgctgcatctgtcaggacacgtgttgtttcctggaatgacgcggcagacaggaaggaatccgtttcaagcgatgctttggtgataccgagaagcaccggacggccagttgcagggcgtttgccttcaagcagaacttttttgtttgcttctgtaaactggtgaatatcgagcagcgtgcctggcagcacttccgtgtcgccggcatcgatgacgcgcactttgcgaagcatctggcgaaccataacctcgacgtgcttatctccgatttcaaccccctgcatacgataaaccttctgcacttcatgaagcaggtattcttggaccgtggtgatgtcagtgactttcagaagctctttcggatcaaccgaaccttctgtcagcacttgaccacgagaaatcttctctccttcagtgactttcaagcgcgcgttgtaaggcgccgtatatgaacggctttcgacttcgccctgaacgacgatttcctgctgtttatcgcgaacctcattgatttcggccacgacaccgtcaatttcagagatcgtcgcttgacctttagggtttcgcgcttcaaacaattcctggatacgcggcaaaccttgtgtaatatcgtctccggcaaccccgcccgtatggaaggtacgcatcgttaactgtgtacccggctcaccaatggactgggcagcgatgattccgactgcttctccgacttcgacatcggttcctgttgccaggttgcggccgtagcatcgtttacatacaccatgtgacgtattacatgtaaatgcggagcggatccacacttcttcaatgcctgcttcgacaatttcaatcgctttatcttcgtcgatcagctcgttttcattcacgagcacttcacctgtttccggatgtttaacaggctttctcgcgaatcggccgacaagacgctcttcaagacgctcgatcacttctgtgccttccgtgatggctttggcaagaatgcctcggtctgtgccgcagtcagtctcacgaatgatgacgtcttgggctacgtctacgagacggcgtgtcaggtaacctgagtcggctgtcttaagggccgtatccgcaagacctttacgcgcaccgtgagtagagataaagtactcgagtaccgttaaaccttcacggaaacttgacttgatcggaagttcgatgatccgtccggccgggttggccatcagaccgcgcatacccgcaagctgcgtaaagtttgatgcgttaccccgggctccggaatcactcatcatgtagatcgggttgatttcatccaaggatttcatcagcttgccttggatcgtatccttagctgcactccagatggaaatgacccgttcataacgctcttcttcagtaatcagaccgcgtctgaactgcttcatcacgttatcgacttttccttgcgcttcttcaaggatttcctgtttgtcgtccaatacgacgatatcggaaacaccgaccgtaattccggcttttgtagagtatttaaagccgaggtttttcatgcggtcaagcatttttgatgtttctgtaatatggaaccttttgaagatctccgcaatgattttacccaaaatgccttttttgaacggcgggttgatttcttggttcttaatggcttctttaacatctgcaccgtaatccaagaagaaacggtcaggcgttttttcttcaatgttgctcttcgtcggttcgttcatgtatgggaacgacggcggaagaatttcgttgaagatcagttttccgacagttgtaatgagcagcttggaacgctgttcttcggtaaacgtttcatttttcaatgagttaaccgcgacggctactctcgtatgcaaatgaacatatccgttttggtaagcaagcagcgcttcatccgtatctttgaaaatcataccttcgccgactgcaccagggcgttctagcgtcagatagtagtttccaagtaccatatcctgagacggtgtaacaaccggttttccgtctttagggttcaggatgttttgcgcagcaagcataaggatgcgcgcctcagcttgcgcttctgctgataaaggaacgtgaaccgccatttggtcaccgtcaaagtcagcgttgtatgccgtacatacaagcggatgaagacggatggcacggccttcaacaagcgttggttcaaacgcttgaatacctaatctgtgaagcgtaggtgcacggttgagaagcacagggtgttctttgataactgattcaaggacatcccagacttccggctgaacgcgctcaattttacgcttcgcgctcttaatattgtgggcaaggcccttttcaacaagctctttcatgacgaatggcttgaacagttccagcgccatttctttcggaagaccgcattgatacattttcaggttcggacctacgacgataaccgaacgtcctgagtagtcaacacgtttaccgagaaggttttgacggaaacggccttgtttacctttcagcatgtgagaaagggattttaacggtctgtttcctggacctgtaacaggacgtcctctgcgtccgttatcgatcaatgcgtccacggcttcctgaagcatgcgcttttcgttttgaacgataatgcttggcgctccaaggtccagaagacgttttaaacgattgttacggttgattacgcggcgatacaaatcgttcagatcggaagttgcaaaacgtccaccgtcaagctgtaccattggtcgcagctcaggcggaatgaccggaagaacgtcgaggatcatccatgacggcttatttccggaattgcggaaggcttccaatacttccagacgtttgatcgcacgtgtgcggcgctgtccttgtgacgttttaagctcttctttcagcatatccacttctttatcgaggtcgatatcttgaaggagcttatgaatcgcttcagcacccattgacgcttggaatttatttccgtatttatcgaggtacgcccgatactctttttcagaaagaagctgttttttctcgagcggtgtattggccggatctgttacgacgtaagaagcaaagtaaatgacttcttccaatgcgcgcggagacatatccagcacaagacccatacggctcggaattcctttaaaataccagatgtgagaaaccggggctgccagctcgatatgccccattctctcacgacggactttagcccgggttacttcaactccacaacggtcgcagactacgcctttataacgaacccgcttgtactttccgcagtggcattcccagtccttttgaggaccgaaaatgcgctcgcagaatagaccatctttttcaggtttcaaagtacgatagttgattgtttcaggctttttcacttctccgtaagaccatgaacggattttgtcaggtgaagcgagaccgatgttcatatactcaaaattgttcacatccagcaaggggcctacctccctttttatcttcgggttataccctgtcacttgcgtataaaattcgtttattcttttgtaacgacatcgcgttctgcgtcagcagaaaccaactcttcggactcttcatcattcggcagagaaagcccttcgttttgtttcgcgtcttcgtcgtcttccaagtctctcatttcgatttcttcttcgtcgcttgatagaattttgacgtccatacctaagctttgaagctctttgatcaatactttgaacgattccggaacaccaggttctggaacattgtcgccttttacgatggcttcatatgttttcacacggcctacgacatcatccgatttaacagtcaggatctcttgtagcgtatatgctgcaccataagcttcaagcgcccaaacttccatctctccaaaacgctgtccgccgaactgcgctttacctccgagaggctgctgggtaacgagtgagtaaggaccggttgaacgtgcgtgcaatttgtcgtcaaccatgtgtgccagtttgatcatgtacatgatgccgacagaaacccggttgtcaaacggctccccagttcggccgtcgtaaaggacggtttttgcgtctcttgacatgccggcttcttcaagggtttcccacacatcttcttcgcgggcaccgtcaaatacaggtgacgcgacatgcagaccgaggcggcgtgcagccataccaaggtgcagctccaacacctgcccgatgttcatacgcgatggtacgcccagcgggtttaacatgatgtcaatcggcgttccgtcaggcagatacggcatatcttcctccggaagaattttcgaaataacacctttgttaccgtggcgtccggccattttgtccccttcagaaattttacgcttctgaacgatgtagacgcggacgagctggttaacgcccggaggcagttcgtctccgtcttcgcggttgaacacttttacatcaaggatgataccgccgcctccgtgaggtacacgcagcgacgtatcacgcacttcacgcgctttttccccgaagatggcatgaagcaggcgttcttccgccgtaagctctgtaacacctttaggggttactttaccaacaagaagatctccgtcttttacttcagcaccgacacggataattccgcgttcatcgagattgcgaagagcgtcctcaccgacgttcggaatatcgcgagtgatttcttcaggtccgagttttgtatcccgggcctctgattcgtattcttcaatatgaatagacgtgtatacgtcgtcttttacaaggcgttcgctcatgatgatggcatcctcatagttgtagccatcccatgtcataaagccgaccatgacgttgcgtccaagggcaagctcacctttttccatggacggaccgtcagctaaaatttcacctttttcaacctcatcaccgacgcttacgatcggacgctggttgtagcaagttccctggttggaacggacaaacttcagcaggctgtatttatcaaggttccctttgactttctggccgtcgacttcttcatagcggcgcacccagatgttcttcgcttccacccgttcaacgattccagggtggcggcaaataacagcggcaccggagtctttcgcagatacatattccatcccggttccgacgatcggcgattcaggctgcataagaggtacggcctgacgttgcatgttcgctcccataagggcgcggtttgagtcatcgttttccaagaaaggaatacatgcagtcgcggcagagacaacctgtttaggcgaaacgtccatatagtcgacgcggtctttcggaacaacggtgttctcccctctgaaacgggcgacgatgctgtcatccacaaaagaaccgtcatcattcaggcgtgcgtttgcctgggcaacgacatagttgtcttcttcatcagctgtcaagtaatcgattctcggcgttacttttccagtttcaggatcgacgcggcgatacggcgtttcgatgaagccgaaacggttcactttcgcgaatgaagaaagcgagttgatcaagccgatgtttggaccctcaggggtttcaatcggacacatccggccgtagtgtgaatagtgaacgtcacggacttccattccggcgcgctcacgagtcaaaccgcccggtccgagcgctgacagacggcgcttatgcgtcagctcagcaagcggattcgtctgatccataaactgagaaagctgcgagcttccgaaaaactctttgattgatgcgatgacagggcgaatattgatcagctgctgcggcgtgatcgtgtttgtatcttgaatagacattctttcacgaacaacgcgctccattctgcttaaaccaatacggaattggttttgcagaagctctcccactgaacggagacggcggtttcctagatggtcgatatcgtcggtatcgcccactccgtgaagcaggttaaagaaatagctgatggaagcgataatatcagaaggtgtaatattcttaacgccttcttcgatataagcatttccaatcacattgattgtctgctccccttcttggtctgtcggagcatagattttgatagactgaagcgttacttcgtcttcgacaactccgccgttcggataaagctttttaaaaccgattccgttttcaaggtacggcagaactttatcaagcgttcttctgtctaaaatcgctcctttttcggcaaggatttcgcctgtttcagggtcgactagcgtttcagcaagccgctgattaaaaagtcggtttttgatgtgaagctttttattaattttataacgtcctacactcgcaaggtcatatcttttcggatcaaagaaccttgaatcaagcaggctttttgcgttttctacggtaggcggctcccctggacgaagacgctcgtagatttcaagaagcgctttatcggtgttttccgtattatctttatcaagcgtattgcgcagatactcgttttcaccgatgagatcaatgatctcttggtcagatccgaagccaagagcacgcaaaagaaccgtaaccggcaacttacgtgtgcgatcgatgcgtacgtaaacaacatctttcgcatcagtctcgtattctaaccatgcgccacggtttggaatgacagtcgcggtaaaacctttcttaccgtttttgtctactttaccactaaaatatacacttggagaacgaacgagctgagatacgatgacccgttctgcaccgttgataatgaaggttccagtgtctgtcataatagggaaatcgcccatgaagacatcctgatcctttacttcgccggtttctttgttgattaagcggactttaacccgcagcggagctgaataggtcacatcccgctcttttgattcttctaccggatacttaggctcgcccaagctgtagtcgataaattccagagagaggttaccagtgaaatcctcaattggcgatatgtcttgaaacatctctctaagaccctcatcaagaaaccactgataagaagaggtttgaatttcaatgagatttggtaattctaacacttcgctaatgcgtgcatagcttctgcgctggcggtgtcgtccatactgaactagttgacctgtcaactgattcacccctcaaatcatgcgtaatatatgtgtaacaagcatttcttcctcaaatatgtaagaaatacttttacaagacaaaagaaaaaagggtttctaatttagaaaaccacatccaaaaacaaaataccgattttattagtgttcccaataatgtatattttatacaaacctaggcgtttcttaaaaacggcagcaaaatatatacattggcattttataatgttaacatagctgaaaatccgagtcaaactttttttgctttgatgatatagtaccctttctttttttgaacgacttcaacgtccgcaaaaagttcttttaatttttcaatggcagaaggcccgccttgttttttctgaatgacgacccacagctctcctgaaggccgcaaatgttcagcgcttttttcaaagatggcgtgcacagtttttttcccggcgcgtatggggggattagtaataatagaagcgaatttttttgcaggttcgacgttggcaaacagatcactctggtagatctttatgttgtcgatctgattatttaacgcgttttccttcgaaagttcgacagctctttcattaacatcgatcatgtgaaccattcgatcttcgaaatccgcagcaagcgaaagaccaatcgggccatagccgcagcctacatccaaaaaatcaccttctgcatccggttcccggaaagcttcaatcagcagccttgagccaaagtccacttctctttttgaaaaaactccgctgtcgctgataaaagtaaacgtccggtttctcaagcgaaatgcccacattgatctgctgctttttgctgaaggtttttccgaataataatggtcagtcatcacagaacctcctcagttggtgaactctccagatatcttgaaacaagatggcttatcttatgcggaagggactacaattaattagcaaagaaaaagcccgcttttaaaagcgagctttcccctaaagattaggtgaagattacttaacttctacagaagcgccaacttcttcaagtttagctttaagctcttcagcttcttctttcgcaataccttctttaagaggttttggagtgttgtcaacaagttctttagcttctttcaagccaagaccagtgatttcacgaacaactttgataactttgattttttgatctcctgcaccagcaagaacaagatcaaattcagttttttcttcagcagcaccgcctgcagcagctccgccagctacagctacaggagcagcagcagttacgccgaattcttcttcgattgcttttactaagtcgttcagttcaagtacagttgcttctttaacggaagcaatgatttcttcgatatttaaagccatttgtaattcctccattttgttttattttttagatactgatgctattaagcgccttgttcttccttttgttctgcaacagctttagttgcaagagcaagattgcgaactggagcttgaagtacgctaagcaacatagaaagcaagccttcgcgagatggaagttcagcaagagctttcacttcttcaactgtggacactttgccttcgattacgcccgctttgatttcaagagcttcgtgctttttagcaaactcgttaagaactttagctggagcgacaacatcttcagtgctgaatgcaatcgcattcggtcctgttaagaaatcgttcaaaccatcaagttcagcttgttcaaccgcacggcgagtcatcgtgtttttgtaaactttgaactcaacgttagcttcgcgaagctgtttacgaagttctgttacttcagctacgttaaggccgcgatagtcaacgatgatcgttgatttactttctttcagtttagaagtaatttcttcaacaacaactttttttgtttcaattgcgctgctcatggttacacctcctgtaagattcatctgtgtaacacttataccgttcggtgatcacgttctttaacgacatgttccatataaaaagcctccattcgacatggaggctgtatatacaagcatacgtaacgctagagctgtgatatatatacacctcggtaggaaattaagccttatcagcacctactgtctacggtataaatggacatattttatttttacaacgttttgaattatatcagaacgtcttatcaaaagtcaatattattttacgttgaaagttgaagggtccactttgattccaggtcccattgtagatgtaacagaaacgtttttcacgtatacacctttagcagcagcaggcttcgctttcaaaattgtgtcgtacattgtcgcgaagttctctacaagcttgccttcttcgaaagacacttttccgattggaacgtggatgtttcctgctttatcaacgcggtattcaactttacccgctttgatttcgttgactgctttttcaacttcaaatgtaaccgttcctgttttagggtttggcataagaccttttggtccaagcacgcgtccgattttaccgacttcacccatcatgtcaggagtcgcaacgatcacatcaaaatcaaaccagccttgctgaattttgttgatgtaatctgcatcgcctacgtagtctgcaccagcagcttctgcttctttcgctttttcacctttagcgaaaacaagaacgcgctgagttttgcctgttccgtttggaagtacaactgcaccgcggatttgctggtcgtttttacgagggtcaacacctaaacgaaatgccgcttcaacagtagcatcgaatttagctgtgtttgtttttttcacaagctcaatcgcttcgtttacgtcgtaagcttttgtacgatctacaagcttggcagcttcgacgtattttttaccttttttagccattttaaaatttcctccttagtggttttagcggaataacctcccacgaataagggttgcgaacttgtctgatccaaactcgcaacccagcaaagagacaaaaattagtcttcgatcacaatacccatactgcgggcagttccttcaaccatacgcatagccgcttcaacatctgccgcatttaagtcaggcatttttgtttcggcgatttcacgtactttatcgcgtttaacggttgcgactttattacggttaggctcaccagaacctgactcaattccagccgcttttttaagcaatacagcagcaggcggagtttttgtgataaatgtaaatgaacggtcttcgtaaaccgaaatttctacaggaatgatcagaccagcttggtcagatgtacgagcgttaaactccttacagaatcccatgatgttaacaccggcttgacctaacgcaggaccaactggcggagctggattcgcttttccagcaggaatttgcaattttacaactttaactacttttttagccacgagacacacctccttaagtccgtgatgtggtaatagggtgaaccctcccactcaaggtctcattctttatatgaatgatgaaaatatcaagctagctgccttgacctttttgccaagacgcacctttgtatattaccacttttatatagtgatttcaagcgcttttccattacaatttgtcaacttgagtaaattcgagctcaaccggggtctctcttccgaacatattaacaaaaactttgactttatttttgtcgtggtcgatctcttcgatcgtccctgtgaaatcagcaaacgggccgtcgataaccttgacggtttcttttaattcaaagtcgatttctgtttttctttcttcaagccccatccgcttcaggattttttccgcttcgcccggaagcagtgcagtcggctttgaacctgatccggctgaaccgacaaacccggtcacaccaggcgtatttcgaacaacataccaggaatcatccgtcatgacaagttcgacaagtacataaccagggaagactttctttttaacgacttttttcttgccgtttttaatatcggtttcttcctcttcaggtacaacgacgcggaatatcttatcttgcatccccatcgattctacccgcttttccaaattcgcctttactttattttcatagccggagtacgtatgaaccacataccatttcttttccattctcattcaggaccctttcagtccttccctccccacaccttaaaagtttattggccgtaccgggaaactgacactttcttttatacgagcctcatattttgaaacaatgaaaaaacccgttgaacgggttttttggcaagtcatatttagatctattataacacgttatgctgatcattattcaactattaaacgaattaattgcgtaatacccgaatcgatgagtgcaaaaaagatggcgaaaaagataacggtggtgataacagtgatcgtatagcgcgttagttcttttcctttaggccaggtgacctttttcatttcttttccgacattctttaaaaatttgataatacccatggtaagaaacctccacaacctaaaaacaaaaacacctattttgtttccagatgtactgtatgtgaattgcagttattgcagtatttctttacttcgagccgttcagccaaagctgcggagcttttcattgtcgtataattacgatttccgcaatttttgcaggctaacgttacttttttcttcatgtttacacctttttctggacgttcatttcctaagtaacatatcacagtcataaaatgactgtcaatatgccataagcatcggctacaagctgatttcgcggagctccaggtacttttcaagcttccttttgacacgctggagcgcattatcgatcgattttacatggcggtttaattcttcggatatttcctgataggatcttccgtcgagatagagcgcaagaacttttctttctaaatcactaagcaattctcccattttcagctcgatatcatcgaattcttcctgattgatgatcagctcttcaggattcatgaccttggcccctgaaatcacgtcgagaagcgtccggtctgattcctcgtcataaatgggcttgtccagcgacacataagaattgagcggaatatgtttctggcgagtagctgttttgatagcggtaataatttggcgggtaatgcataattctgcaaaagctttgaatgaagtcagcttgtcctctctaaaatcacggatagatttgtagagtccaatcatgccttcctgaacgatatcttcccgatcagccccgattaagaagtaggatcttgcttttgcccttacaaaattacggtactttgtaatcaagtaatctaacgcatcactgtctccgacatgaaccatttcaatgacctgctcgtcttccaactggcaaaaacgttctttgctgaactgttctttgctgaattttccctggttgttttgtaagttcactccgatccccccgaccgcacgtagatagaaatattatacagtaatggacaaaaaagcgtcaacctaatccaagtcgccacgccgccatttttcgaagatcctcaagacgtcttctgacaatggaattttccctgcgggacgctctgaggtgatttgtttcaccctgttttcaatttgcctttcgatcgcttcgacctccctgagcagctctctggccgatttgcgcagggccccctggccaaaaatcgcccactgctctgtgtaatcggatgtggcaacatggatctgcgtctgaatactattcaagtctgacaccagtttctcgatccgttcatcagccgtttcattttcccttgtgaatatcacttctacgcgatgattgaccttctttttctcgattcctttaacgagatgcgcatcaaagacaacgattacccgaaaccctgtatacgattgatattccgccatcttctgaatcaacaggtcccttgcttcttcaaaactgttttcttttaaatctttcagctgaggccaagccccaatcatgttataaccgtcgaccaacaggatgtccattccgtctattctcccagagggcttcgtttccggtacacttcatacatcagcaggccggctgcaactgaggcgttcagggatgtgacctttcccgccatcggcaggcgaatgagaaaatcacatttctctttaacaagccttcccatgccttttccttcgctgccgatgacaagcgcaagcggcatatttccgtccagcgacctgtagtcctgttgtccagacgcatcggtaccgacgacccaaatgccccgtcccttcatttcttccagggtccgcgacagattggtcaccttgacgaccggaatatgttcgatggctcctgtcgaggctttggcgacagtcgttgtaaggccgaccgcgcgccttttcggaatgacgatgccgtgagccccgaccgcgtctgcggtgcgcataatagagcccaggttgtgcggatcctcaatttcgtctaatacaaggataaacggctgttcatttctgtcttcggccttttgaaaaagatcatccagctcggcatactcgtaagccgctacctgggcgacgacgccttgatgctgtccggaaaccatttgatcgagtttttttcttgggacataatgaatcgtgacgccttttttggcggcgagatcgacgacttgctgagcctgtcccttcactgtgttttccgccatccacagcttatacaattcccggccggactttaatgtttcgatgaccgcgttttttcctatgacgtaatcatgctgctgactcattttacttcctccctgccatcccgtttttccagcgctgctttgatgagttcattaagcctatcttccctgttctcaagaaaaagatacccgatgaccgcctcaaaagccgtactgtaacgatatgtttggacatccgtgtttttcggtaccgttccggatttggcattccgccctcttctcagcacagcctgttcttcctcggtgaaaaattcctgctcctcaagcgcaaacagcatgcttgcctgcgacttggcggagacatatcgcctcgactgccggtgcagatcattgggccttgtcatgccttgctttaagaggtgatgcctcacatatacctccaaaacggcatcacccatgtaagcaagcgccaaaccattcagctgtttggcgtctttaatggtttccaaattcatgtttatgattctcctcttttccagcgcgtgccctgcggagtgtcctccaagataatattcatgcttttcaactggtcgcgaatctgatcagatgttgcaaagtcgcggtttctccgggcctcattccgcttctcgatcagttcttcaatgtctttatccaaaagttcctgttccttgagggagaagccgagcactgagcagatctcgtcaaacagctgtataaacgcctgaatgacatgttctgcagtattcttttcctgcaaatagtagttggcatgtttggccaggtcaaacaggacggaaatggcattcgctgtattgaaatcatcatccatagccgtttggaaggcttttcgctgctcttcgattttttcaagccattctgaatcgccctctgttaaatttgtactgctttttaggcgatgctgcaaattgctataagctgtttttagacgtccaaaagcgttttttgtgttctcgagaagttcgaccgaatagtttatcggatgtctgtaatgaacagacagcatgaaaaaccgcagcacttgggggtcatgctctttaataatgtcatgcacaagaacaaagttgccgagcgattttgacattttctcattatcgatattaatgtagccgttatgaagccaatatttcgcgaaaggcttccctgttaatgcttccgattgggcaatttcgttttcatgatgcgggaaggccagatcctgaccgccggcgtgaatgtcgatcgaatcgcccagatattttctcgccatcgcagagcactcgatatgccagccgggacggccttttccccaagggctatcccaggagatttcgttatctttagccgctttccatagtgtgaaatcgagcgcatcttctttcttttcgcccacttgaattcgggcgcctgatctcagctcatcgaccgattgatgcgacagctttccatagccttcaaacgatcttgttttataataaacatctccgtccgcctcataggcatagcccttatcgatcagcgtctgaataaagtcgatgatctcatccatgttttcagtgacgcgcggatggcagtcagcttttgtgcagcccagtgaaccgacatcttcgaagtatgccttaataaagcgttcggcgatgaccggcacttcctctccaagttcatttgccgctttaattaatttgtcatcgacatctgtaaaattggagacatattggacttcatagcctttatactctaaatactttctgacagtgtcaaacacgatagccggccttgcgtttccgatatggatgtagttatatactgtcggaccgcacacatacattttgaccttgccttcttcaagaggcacaaacggctctttttttcgtgtgagagtattatacaatgttagtgtcacagctcatcttccctttcttttctccggagctcttgtttcagctgcctgatttcgttttccaattctctgaagcggtcagccaccggatccggcaaatcctggtgattcaagtcgcgtctgattttctttccgttttgtacgacgacccggcccgggatgccgacaacggtggagcattcaggcacatcgtgcaggacgacggagcctgcaccgattttcgcccctcttccgactgtaatggatccaagcactttggcccctgttgagatcagggcatcgtcctcgattgtcggatgccttttgcctttttcttttcctgttcccccaagcgtcacgccctgaaaaaccgtgacattgtttccgatctcacaggtttcgccgatcacaacccccatgccgtgatcaatgaaaaatctcctgccgatcttggcacccgggtgaatttcgattcccgtaaagaagcgggcgatttgagagatcgctctggcgatgaaaaacctttttcttttatataaagcatgtgcaattcgatgtgcccatatagcatgcaaacctgaataagttaagatgacttcaatgtagcttctcgcagccggatcttggtcaaatacgacatctacatcttctttcagcattttaaagaacacatgattccccccgttccccgcttcctttgtctctattgtcaaaccatataaaaaacgcctctgtctgatgacagagacgctttttgacgcgcggttccactctgtttagaaaacagcacagctgttttctcaactctcatccataacggcggataccgcctttgaatacttgttataaaaacgttcttcaaaggtctcaagaggtgcatttctaaagcccggcgcttaagtcttttccagccgatgaagactctctctttaaaggccctggctttatacttatccctgtcaacgatttatcttattgaataatgttatgcagccgttttaaaacggtgtctttccccaataattcaatggactgaggcagttcaggaccgtgggtctggcctgtcgtcgctacgcggatcggcataaacagctttttccctttatgtcctgtttctttttgaacggctttgatggatgccttgatctcatctgccgtaaacgagtcaagctgctcaagcttttcggcaaatacgcgaagcacttccggaacctgctcttcttctaaaactgttcttgcttcacgattatactggatatcgtctttaaagaacaactctgttaactcgacgatttcagcgccgtagctcagctgttcctgatatagggaaatcagcttgcgcacccattcctgttcgctgcctgaaagctcttctgaaaccttgcccgctttttgcaaatgcggcacggtcaattcgatgacctgatcaagatcaagttttttcacatactggttgttgacccatttcagtttatgcgtatcaaacaccgctggtgattttgacaaacggtttacatcaaatatctcaataaactgttcttttgtaaacagttcttcttctccgaccggcgaccagcctagaagagtgatgaagttaaacaatgcttccggcaaatagccgagctcttcgtactgctcgataaactgaatgatggactcatcacgtttgctcagttttttgcggctttcattgacgattaatgtcatatgtccaaatgccgggatatcccagccaagggcgttgtaaatcatgatctgctttggcgtattggaaatgtggtcttcgccgcgcaggacatgcgtcattttcattaaatagtcatcgaccgctacggcaaagttgtaagtaggcgttccgtctttcttcacgatgacgaagtcgccgattccgtctgtttcaaaagaaatttctcctttgacgatgtcatcaaagcggatgacttcaccttgaggcactttaaagcggatgctcggctgtcttccttcagcttcgagcttttcctgctcttcttttgttaaattgcggcacttgccggagtagcgcggcatttctccgcgggcagcctgttcctcacgctctttctcaagctcttcttccgtgcagtagcatttgtaggctagccctttttcaagaagctcctcgtaatatgttttgtaaatgtcgtttctttcggattggcggtatggtccgtattctcctccgacatccacgctttcatcccagtcgatgcccagccattttaaatagttcagctggctttgctccccgccttcaatgttgcgcttgcggtccgtatcttcaatgcggatgatgaattttccgccttggctccgggcaaacaaataattaaaaagagcggttctggcatttccgatatgtaaatggcctgttgggctcggcgcataacgaacccgaacttcgtttcccatctgtctaacttcctttcgtctctagcagagttcaaatttatttcctattctatcatcaaatgaacctgtcttcaaaatgaattataccttttggagcagaacggaagcctgggcggcgattccttcggctcttcccgtaaatccgagcttttcggttgtggtcgcttttacgttaatttgggaaatttccgcctctagcccttcggcaattctggctctcatgtcttcgatatacggcgccattttaggcttttgggcgatgattgtacaatccaggttccctagcgtatagcctttttccttcacgatcatccagacgtggcgaaggagtttgaaggagtcggcatctttgaattcaggatcggtatccggaaagtgttttccgatatcgccctcgccgacggcaccgagacatgcatccgcaatcgtgtgcaaaagcacatctgcatctgaatgtccgagaaggcctttttcgtaaggaatcgtaattcccccgattatgagcggcctgccttccactagttgatggacgtcaaatccttggcctattctaaacatgttcattcctcttttccgcttctaatatcgcttctgcgacaagcaagtcatccggggtcgtcagtttgatgttttgataatccccttgaatgattgcaaccgtacctccggcttcctcgacaagactggcgtcgtccgtaccgaggaaaccttttgcttcagcctcaaggtgagcattcatcagaatagaaagacgaaaagcttgtggggtttgagcggcccacaagcttgaacgttcaatcgttccggctatctcaccgtcttgaacgcgtttgatcgtgtctttaacaggaacggcaacgatggctgcccctgtttcctttgctttctcgacaagctgttcgatatattcccgtttaataaaaggtcttgctccgtcatggacgaggaccgtttcctctttgccggccgctttaatgcccgcaaaaacgctttgctggcgttctcttccgcccggcaccatctcgatcggagtcttaaaatgataggtttttaaaagggtgttgaattcaccgaattcctgttcattgatgacaagaatgatccttttgcaggcatcatggttttcaaacacctttaatgtatgaataatcacaggtattcctttcgcctcgataaacagtttgtttttcccggcattcattcgtttaccttgtccggcggcaggaatgacgacttcataattcattttatttctccctttttcaaagcgccttttccagcagtttcggcttggcgaatatcattctgcctgccgctgtctgcagcacgctggtcacgagcacgtcgatatgtttgccaatataatttcgcccttcttcaacgacaatcatcgtgccgtcgtccagataagccacgccctgattatgttcttttccgtctttgatgacctgcaccttcatttcttctcccggaagcacgacaggcttgacggcgttggcaaggtcgttgatgttcaatacggcaaccttttggagctcgcatactttgttcaaattgaaatcgtttgtgacgacaacgcccgaggtcagcttcgccagtttgacgagcttgctgtcgacctcttggatgtcttcaaaatcgccttcataaatttcaactttaatatcaagctctttctggatacggtttaaaatatccagtcctctccgccctctgtttcgtttgaggacgtctgaagagtcggcgatatgctgcagttcctcaagcacaaactgaggaatcacaatgacgccttcaagaaatccggtctgacaaatatcagcaattctcccatctataataacacttgtgtctaaaattttcagctttttgtcttcttccggacgctcttcctcagcagaaccttttttctttctcgatgtaaaaagtgtcagcatttcatcctttttcttgaaacccacacggaatccgagatagccgagaaatgcggccaacacaatcggaatgaccgtgctgattaactgataagggatgtcttttaacggaatgacgttgacgataagataagcgagcataagtccgaagattaatcccaaagagccgaacaacaagtctgagacaggtgctttgatcaaggaatcctcaatctgtttcacccagttgatgacgtgatccgcacaccagatgcccagaagaaaaaagatgatagctcctaaacaagcggacgcatacgggtttgttactaaaggtatgtcctgtacatttaacagtacaaacaattccggtatgagaaaaataccgataacgcctcccaaaatcgcaaagaacgcttgaactattcgttttaacataccttcacctcctttaaaataatcgttttaatttttataaatgcagctgtttccacgtgaaaaagggaaaacaaaaagtaagaataatatacccataaattgcaaattttaatcacttctagaaaattttctcacagctgcctgtcagtataatgtttctcctgaagtctctttaaccctttctttatcttttgggcacgaacagccccaattccttccacttcatccaaatcttttacatccgcttcgataatgagctttaaatggccgaatgcttcgacaacattttcgacgatcggcatcgggaggcggggaattttgtggagaagcctgtagcctctcggaaaaacgtattcttccatgttcgtagttgctgaatagcctaaaagcttaaggagaatcgcatcatccagcaattcgaaactcgacatatcctgaagctgtttcagcagaacaaacgggtctttgattttttctttcacataatctttgacgaacagcgccgcttcctgctccatatcggtgatcagttcgctaacctggagtctgatgagatggccttctgttccaagctctttaatatacatattaatttcgtttttgattctgagcaccatttcatatcgatgcagaacggagatgacatccccaaatgtaacaagctcttcaaattccagcgcgttcaaattggaaatcgcatggtccaaaatgagtttgtatttttcgagcgtctgaatcgcctgattggcttttgttaagataaagccgatatctttgagtatatatttcatattttcctgatagagcgtaatcacattccgtctttcagaaatcgcgatgatcagacagccggtctgcttggccacacgctcggctgttctgtgtctcatgcccgtctcagaggagggaatcgtcgcctcaggcatgagctgtgtattggcatatagaattttttgccctgaatcgctgagaatgatcgccccgtccattttagccagctcgtacagatgagccggagagaaagaagaatttatgtggaaccctccgtcaaccacttctttcactttatcgttgaagccgaccacgattaatccgcctgttttggcccgaaggacgttttcgattccttcgcgaagaggcgtgccgggggcgacaaactgcaatatttctgaaagatcctgtttcgctccttttttgtctttgtccatatattatgatcctcctaatgaagctcgaagggcctcagctacattttcaacgccgacgacttcgattcctttcggctttgtccatccttctacatttgcagaaggaataatcattcttttaaaaccaagcttcgccgcttcctgcaccctctgttctatccttgatactctgcggacctcccctgtcaatccgacttctccgataaaacaatccgtcggatgaggcggggtgtctctgaagcttgaggcgatgctcactgcaacggcgaggtcaatcgctggctcgtccagcttgacgcctccggcgacttttaaataggcgtcttgattttgcagcagcagtccaacccttttttctaaaactgccattagcaatgagacgcggttatgatcaatcccggttgccatccggcgcggattcccaaagctcgtgggggaaatcagcgcctgaatctctactaagactggcctcgtgccttccattgaggccacgacactcgatccggccgctcccgccgagcgctcttcgagaaagatttctgacggattcagcacctctgtcaggccctcttccctcatttcaaagattcccatttcattcgttgatccaaaccggtttttgacggctcttaaaatccgaaatgtatgatgccgctcaccttcaaagtaaaggacggtgtcgaccatatgttccagaagtctcggtccggcaatcgaaccttcttttgtgacatgcccgacgataaatattggaatccctttcgtttttgcaattctcatcagctcagcggtgcattccctgacctgggagacgctgcccggagcggatgtgatatcactttggtaaacggtttgaatcgaatcaaccactacgaatgatgggttcatctcttctatagaagacgtaatatactccatatcggtttcagataaaacgtgaagagtgggactgttgatacctagacggtctgctctcagctttgtctgcttgaccgattcttcgcctgagatgtacaggacattttcttttgaatcagcgagctgggcagatacttgaagcagcaaggttgatttcccgatgccggggtcgcctccgattaaaacaagtgaccctttgacgatgccgtttcccaagacgcggttgaattcgccaagtttcgttttaattcgcggctcttctgttgtttcaattgaagtgagaggtgaaggcttttgcaccgtttgaacggaatgtgaaaaagcggttcttctgttggcggcgggtttttttatcgtttcttccaccatggtattccatgcaccgcatccggggcatttccccatccacttggcggattcgtagccgcatgagtgacaaatgaatttagtctttgttttagccattgatttttcaaaacgctccctttataagaaagtgaggcatactgatgaacatcgtatgcctctttcttttgtctctatattagttcgttttagcttcggtttttacgacaaattctccgtcttctacatccaaaacaatatgctggcctttttgaatatggccttttaggagctcttctgacagccggtcttccacgtgtttttggattgctcttctgagagggcgcgctccgtattcgagatccacgccttcatcggcgattttttctttagccgcttcagtcagctcaattgaaagatcctgttctttcagacgcttggtcaattggtctgacatgagggatacaatatctttcaaatgttttttctccaaagagtggaagacgatgatctcatcaatccggttgataaattcaggtctaaaggcgcgttttagttcacccatgactttgtctttcatatctttataattctgggtttcatcctgcacattaaacccgacgtatttatttcttctcagttcgctcgcaccgacgtttgatgtcatgatcaaaatcgtattcctaaagtcaaccgtgcgcccttttgaatcagtcaggcggccgtcttcaagcacctgcagcaaaatattgaagacatctgggtgagctttctcgatttcatcaagcaagacgacggaatacggttttcttctcactttttcagtgagctgtccgccttcatcatagccgacatatccaggaggtgaaccgacgagtcttgatgttgaatgtttttccatgtactcggacatatcgatgcgaatcattgcttcttcatcgccgaaaatggactcggcaagtgcacgggcaagctccgttttccctacgcctgttgggccaaggaaaataaacgaaccgataggacgttttggatcttttaagccggcacgcgcgcgtctgactgcttttgcaactgcaacgacagcctcatcctggccgataacgcgggaatgaagaatgctctccatgttcagcaatttgtctgtttcggtctgcgcaattttggaaaccggcactccggtccagcttgatacaaccattgcaatatcgtcgacggtcacttcggaattttcttgaccttgcttttctttccaggttttcttggtttcttcgacctgttcacgcaagcgctgctccgtatcacgtaaagacgctgctttttcgaattcctggctttgaacagcggcatctttttctttccttacctcatcaagcttttgttcaagctcttttaagttaggaggcgttgtgaatgaacgcagtctaacctttgagccggcttcatcgattaagtcgatcgccttgtcaggcagaaaacggtccgaaatgtagcggtctgacagctttactgccgcttcgatcgcttcatccgtaatcgatacgcggtgatgggcttcatagcggtctctgagccctttcaatatttgaatgctttcttcaggagacggctggtcgacctgaatcggctgaaaacgccgttctagtgcagcatctttttcaatgtatttgcggtattcatcaagggttgtcgccccgatgcattgcagctctccgcgcgccagcgacggtttaaggatattggaggcatcgatggccccttccgctcctccggctccgatgagagtatgcagctcatcgatgaagaggatgatatttcccgcttgacgaatttcgtccatcacttttttcaggcggtcttcaaattcaccgcgatatttcgtgccggcgacaaccgttcccatatcaagtgtcatgacgcgcttgtcgcgtaaaatctccggtacttcgttattgatgatctgctgggccaggccttcggcaatcgcagtcttaccgacaccaggctccccgattaacacagggttatttttcgttctgcggctcaacacttcaatcacgcgttgaatttctttgcttctgccgatcacgggatcaaggctgtcttcttttgcaatcgccgtgagatcccgggcaagactgtctaaagttggtgtgttggcgctactgttggcgcctgaagcagcgcctccgctctcattgctgcccaacagctgcaatacttgctgtctcgctttgtttaagctgacgcctaaattattcagcacccttgccgcaacaccttccccttcgcggattaagccaaggaggatgtgttcagttccaacgtaggagtggccaagctttctcgcttcatccatcgccaattcggtcactttcttggctctcggtgtgtaatggatcgattgtgacatttcttgtccgcggccgatgaggctttcaacttctttttgaatcttgtcagggctgagtcctaacgcctgcagcgctttcgcagcaattccttctccctcgcggacaaggccgaggagaatatgttctgttccaatgttattatggcccagacgcagagcttcttcttgagcaagcgccaatactttttgtgctctttctgtgaatcttccaaacatcatatcgtttcatcctcctgtctattgccgttgttttctaatttcaagcgctccctgataagagcagcccgcctgatgtccctctcgtttggccttaaggctcctccggaatattgctggagaaatccaggctgtgtcaggatcatcagctcattaagtatattgctggaaagaccttttattatccccaggtcaattccaagacgaacgtctgaaagacatcttgctgtttctttcgactcgatcatccggcaattggacagtacgccgtaagatctgtagacgcggtcttcaagttcgatttgcgaagtctgataaagcgcctttcttgctgaacgctcttgttcgatcagctgagcaacgacactgttcagatcttcgacaatgtcgtgttccgatttaccgagggtaatttggttggaaatttgaaagatattccctaatgcttcgctgccttcaccgtaaattcctctaacaacaagccctaattgattaattgccggaataattctgtttatttgcctagttaacactaaagcaggaaggtgcatcatgacagaagctctaagccctgttccgacatttgtagggcagctggtcaagtagcctctttgttcggaaaaagcgtagtcgatccggtcttcaatccaatcgtccacctgatttgctgctttcaatgcttctgacagctgaaatcccggaaatagacattgaatgcgaatatgatcttcctcattcagcataatactcacttcttcattttcagaaagaaggcatgcgccaaaggaagcttccgtcaaatgcggactgatcagatgtttttccacaagaacccttttttccaaaggctggacctgatccattttcacaagctcaaacttcccgataccgggcacttcatagcctgtgaactgttcttcaaacaatgctataatcgctgaagcctcttcatttgaaaaaagcgttggaaaacggactttatccaaattgcgcgcaagacggatccggctgctaagcacgatgtcactctcagggccttcttgccgcatccaattgcttaaagcattctgaataaaatgctgcagtgacatcagtcctcctcctccttgtttgcattcaggttttgttcaagcgatctgatctgatctctgatgttggctgctttttcaaattcctcctgctgaattaattctttcagctctttttttaatgcttcaatttgtcttcttacatgcagattaccgccgatccgctttggtattttacccgcgtggaccgtgttcccgctgtgaacttttcttaaaaccggagtgatataggagtggaaggttttataacattccgaacatccaaaccggccggtttttcgaaattccgggaacgtcatattgcattttttgcatcgcaaaacctgatccggctgttgaaaaagctgcgcctcgctgctgtttgtaaaagacgagtcaaaattaagcagtccggataataaattatggatggaaaatccgccactttcattcatagaatatgactcgctgttctctttcgcacattgttcacagatgtgcatttcttttttttcaccattaataactttcgtaaagtgaaaagttgccggtctttctttacactcttgacatatcacgcttctcacccgctttacttaaatttaagtgacgtaagcatggctttcatcattcttgctcttaattcgtctcgttcaggcaaatcaatatataaaacagaacggtccatgacactcaccatcaatttcgcttcgctttctgtaatgacaccattttctaacagccttaaaatgatgtcatctgaagcagcctgggagagccttgtatagatttgattcataatattgttaatcaaatcaattttgtcgttcattttaattttaataattcggatataaccgccgccgcctcttttgctttcgacaatatatccgcgctcgctcgtaaaacgcgtattgattacgtaattgatctgagaaggaacacactgaaatttatcggctatttcgctccgtttaatctctaatatttctttcccgttctgttctaatatttgtttcaaatactgttcgattatgtcagaaatatttttccccactcagccccctccttcacttgactttgactatatttgactttaactttactataagtggttttcgtttttttttcaactaattgctcttcgtcctttattatttccacttttagctgtcataaaaccttagggaaaagaaaaaagaccagcttttatataagctggtctttctaagctgttggacccgttgatcctgtcgcccctgttggacccgtcgctcccgttgcgcctgtggctcccgttgcccctgtcgggccggttgcgcctgtcgctcccgttggaccggttgcgcctgtcgctcccgttggaccggttgctcctgtcgctcccgttgcgcctgtcgggcctgttggtcctgttgctcctgttggtcctgttgctcccgttgcgccggttggacctgtcgctcccgtggctccggttggacccgtcgctcccgttgcgccggttggacccgtcgctcccgttgcgccggttgcccctgttggacctgtcgctccggttggacccgtcgctcctgttgccccggttgctcccgtcgctcctgttgccccggttgctcccgtcgctcctgttgccccggttgctcccgtcgctcctgttgccccggttgctcctgttgcccctgttggacccgtcgctcccgttgctccggttgccccggttactcctgttggacctgtggctccggttggacccgttgggcctgtcgcccctgttggacccgtcgctcccgttgcgcctgtggctcccgttgccccggttactcctgttggacccgttgggcctgttgctcccgtcggacctgttgctcctgttgggccggttgctcctgtcggacctgttgctcctgtcgggcctgttgggcctgttgctcccgtcggacctgttgctcctgttggacccgttgctccggttggacccgttgctccggttgcgcctgtcgggccggttgctcctgttgggcctgttgctcccgttggacctgttgcccctgttggacctgtcgctcctgttgcccctgttggacccgtcgctcctgttgcccctgttggacccgtcgctcctgttgcccctgttggacccgtcgctcctgttgcccctgttggacccgtcgctcctgttgcccctgttggacccgtcgctcccgttgccccggttactcctgttggacccgttgggcctgttgctcctgtcggacctgttactcctgttactccttttggaccggttgagcctgtggctccggttgctcccgtcgggccggttgctcctggcggacctgttgcgcctgtcgctccagttggacccgttgggcctgttgcccctgttggacccgttgctcctgttgggcctgttgctcctgttgcccctgttggacccgttgctccggttgccccggttactcctgttggacctgtggctcccgttgcgcctgtcgggcctgttgatcctgttgagccggttgctcccgttggtcctgttggacccgttgctcctgttgggcctgttgcccctgttgggcctgtcgctcccgttgggccagttgcgcctgtcgctcctgtcgggccggttgctcctgttggacccgttgggcctgtcgcccctgttggacccgttgctccggttgccccggttactcctgttggacctgtggctcccgttgcgcctgtcgggcctgttgatcctgttgagccggttgctcccgtcgctcctggttgatcaattgttatcattgcaacatcatcaattagtatcggtgcccccccactaagagggagtttttgaatagttaccactcctataacggttccaggaggagcactattcgttgtagcatatatttcattccacacatttactgcagatagacggtttactggaattgttaagcttaatccctgcgacaaaaagtcaaaagaggagttgtaataatctactgttattacaatcgcaggattaggagcgctgctagcttttgaaatagatataacaaattcaaaattctctcccgggttaaccagaaagctctgagctaagattccaatcgatgaagttaccaagttaacactataaatccctgaatggctgaaattagaagtaactacggcattaaatcctgtccaaggcggcagagaaccggtttcaaaccctccatttattattcgattctcaatggtcaatcaagtttcaccaccctttctcaaaaattgagataataatatccctcaaacaaaatatgaaatatctatgtataccgtttggataaaactctatttctttgaatttttataacgccaatcgctataaatgataaattttataatttatcattagaatcttttaaacaaaaaccccctttaagctttatgaaaacttaaaggggactcttcattttacaatcaatcaaagattacagcatttagcgctcttgtattaacattggctgccaaaaggttagtccctgttacattaattctaacctcataagtttgtgttcctgcccctggtgtatcaacccatgtaaggttaggaatatcaccatatacacgaaccgaacctgccgatttttcatcctgagaatcaacagacacttgtgcgatagcgctgttatttctatacaatgtaaaaattatactgtattcaaaagtagtagctggccctatgataatatcaacttcagccatagaatcgagttttatattctgtccagctgaagaggtaacagttgtcgttagaattggtgtttcgctgccaactgtgagtgaaacagggtcagttgactgcgccggtgttcccaacagacttcccggacccgttgcgcctgttggacctgttgctcccgtcggaccggtggctcccgttgcgcctgttgctcccgtcggacctgtcactccggtcggacccgtcgctcctgtcgaacctgttgctcctgtcggacctgttgctcccgtcggacctgtcactcctgttggacctgtcgctccggtggctccggtggctccggtcgggccggtggctcccgttggaccggtcgttcctgtcggacctgtcgctccggtggctccggtggctccggtcgggccggtggctcccgttggaccggtcgggccggttgcgcctgttactcccgtcggacctgttactcctgttggacccggcgctcctgtcggacctgtcactcctgttgctcctgtcgctcccgtggctcccgttactcctgttgctcccgtcggacctgtcgctcctgttggacctcctccaccctcaacactcaatagagcaacatcatccacaagcacacttgcagttcccgcctgcggaatgttgttgatcaaaatgaatgcctgggtggtgccagagggagccggtgaagttgtttgatagacttcaagccatgtcccattttcggctgccggtattctgcttgacggcacagtggcaaacagcccgtatccgagaaaattaaattgactgtcaaaataagtaacctgtatcgttacagaaggtgccgggagaaagcttgctctcgcaagagaaacaagaaattcgcttccttcccccgccctggccggaacaaattgagcaatatatgatgtgactgttccgccaagaaatctcgcagagaaaaaacctgaatgcgaaaactggcttgtaacagatgcgtttacgcctaaccaggacgagagggtacctgtctcaaaacccccgttcatcaccgcgtttcgaatggacatttttccacccccaattcctcttcaatttgtggctgcaatgatctttaatagatattgaagctctatatcctatgatctctctttttatgcagacacgttatataacacggctgagatgaaaaaccgtcacttcatcaaccggcctggattgcccacagccgttttgcctgcgggaacatcttttgtaatgacggcacccgctccaatgaccgccccctccccgacgacaaccgccggcagcaatgttgcgttattcccgattttcgctcctcttttaatagttggaccttgatacgggtagtttccctttcccatatatttatcatttgacgtggaacagcagggaccgataaacacttcatcctcaatcgtcatatcagcagtgatatagcagcccgtttgaattgttgctttacttccaattctggtattgttttcaaccatcgcattgcgtcctataatgctttctctgccgatcgcgacattttcgcgaatgctcgccatatcccccacgaagacgccttgttccaacagcacgtctcggtaaatcacagcgcttgctccaactatggcatcatcttctatccgcaaaggggctcctgcctgcttcggctggcgagccatttttttatttgaagaagccgctttgccaaggacggccaaatcgccgattttcaccccgctgccgatatgagtgtcctttttaataatggcatgatggccgattgttacgttgtccccgatgaccacattttcttcaataacggcatgctctcccaataccacgttctttccgatctttgcagtttcatgaatcattgcttacatcctccatttctcatttacacctgctgtagcatattcaatgcggacgtaatgagaaacggcttcataaaaaaacacggccgccgtcaggcgaaccgtgctacttttctcttcttgcaaaatcgacaaaccggaatttatcaaggcggtgtctgctttccgtatattgaaacaaggtcgtatcatcaagaaaaacgaaatttttcacgaccacaatgtgctcgtatccgttcagatccaaatactcttgatcctctgccgtacatggctcgactacaatttccttatgagcatagctgatgacgagcccgcattcatcttcaaggtattgatagatcgagtcctcgcatatttctttcgttaaaagcggcacgtgtttgcggataaaatagtctttatccaggatgatacgctctccgttgatgttccgcgacctgacaacccgccatacctcttcatctccggaagtgcggagctgcttttgaatatatgcgtccggatgcgtcaagccgaactcatggaccgtcgtgcttgtctcttttccgagcgtttctgaaagctccttaaagctgaccaaaccggaaaccgggaactgcattttctccctgtgcagcacgactgaccccttccctttaatcttctgaatatatccgttctgagcaagcacgttcagcgctttccgaacggtttccctcgaggtgtcgtgctgttcggcaaggtcgttttcagacggcaggatatctccggcattcagtatgctttgatcgatttgttccgcgatttgtttgtaaatcatcatatacttgttgatcttcatttttttaccaccacgcttagtttagcatggtttggcaagatgataaacaatcgattgatatggtttcactgtgaagcgtttaaatgactcgggaagatcggtgtcattggaaatgagaaccttggcatcatagccttcaatatcaatatcgtcaggcagctgaaactcggtctctttcccgtaaaaattattgatcaccagcagtttttcatccgctccgtttctcaaatacgcgtaaagctcttgatcgtcttccagtatgagctgataatcgccggttgtaatgatatcgaattccttgcggagctcattcagctttttataatggtagaaaatcgaatcaggatcgttgagcgcttcttctgcgttgatttctttgtagttgtcaggcaccggaatccacggtgtgcccgccgtaaacccggcattttcttctccgttccactgcaccggcgtccgcgaattatcacgggatttcgctttcaagatttcgatgatttcggcttccggcttccctgcttctttcaggatacggtacatattgagagattcgacatccctgtaaagggagatgtcatcgaatttcgggttggtcatcccaagctcttctccctggtaaatgtatggcgttccctgaagcatatgaatcgcggttgccagcattttcgcagactttttgcggtattttccgtcgtccccgtaccgtgagacgatccgcggctggtcgtggttgcaccagaacaatgcgttccatccgccccctttattcatttccgtctgccattcagaaagaatcttcttcagctttagaaaatcaaaatccgcaagcgcccatttttccccgtttggatagtcggcctttaaatgatgaaagttaaacaccatatcgagctcacggctttcggggtttgtataccggatgcaatctgcgattgtagtcgatgacatttctccgaccgtcatgctgtcatattttgaaaaaacctccctgttcatttcattcaaaaactcgtgaaccctcggcccgtccgtataaaatctgcgtccgtccccctcgtcatcatcagggaaacgctggtcttttgagatgacattgatgacatcaagtctgaagccgtcgattcctttttcaaaccagaaatgcatcatctcgtacactttttttctgactgcttcattctcccaattcaaatccgcctgtgtcacatcatagagatggagataatactgtccgctctctgcatgaaactcccacgccgagccgccgaatttcgattcccaatttgtcggcggagcgccgttcggcttcatgtctttccaaatataaaagtcgcggtacagattttctttgccggacgccgcttctttaaaccatctgtgctctgttgatgtatggttgacgacaagatccatgatcacctttatgccgcgcttgtgggcctcttcaagaagctcttcaaagtcggccattgttccatattcttcatggatgctgtaatagtcgctgatgtcatagccgttgtcgttttgcggcgattgataaatcggcgtcagccaaatgacatcacaggcgagctccttgatgtagtcgagcttttcgatgatgccgcgtatgtcgccgacaccgtttcctgttgtatctttaaagcttttcggataaatttggtagacgactgcttttttccaccatggattttcttttgtttccattttcaacaccaccgctttcttctttatgaaaatgggaaaagggcagacaaatatgcgcgcccctctccctctcttatttcatttttaattttgcgtagagatatgttccggcaaacggcgcgatcaacacgatcgccattccgatcgcaaacgctccccagtattggctcataatagagaaaattccaggtacgccgccgacgccgacagagcttgccaaaaccccttgcgaggaaatgaacataccggcaatccccgaactgatcatcgcgatcacgaacggaaatctgtatctgagattcactccgaacaatgccggttcggtaattccgagataagctgaaattccggatgtcagggacaggcctttctgcttctcatctttgacaataaacatcatcgcaagcgcggctgaaccttgtgcaatattggacagcgcgagcatcggccataaaaatgttccgccgagctttgagccgatcagctgaaggtcaacggcaaggaatgtatgatgcattccggtaatgacgagagcggcgtaaagccctccgtataacagtccgcccagtacggcgaattgttcaaagacagcaataaggcctgatgttaaaacatttccgatggcaaatgtaatcggtccaaggacaataaatgaagcaaaacctgtgacaagcagcgtaatcggtgccacaacaaggagctgaatgctctcaggcgtccgctttgtcaaaaagcgctcaatttttgccagcaaataagaagcgagcaaaatgggaagcacctgcccctggtagccgaccttctgcacttccaaaccgaataaattccagacaggaatctctccgctttgctccgcagccccgtatccccaggcgtttaacaaatcagggtgcacaagcatgacgccgagcacgatgccgagcagcggatttccgccaaaccgcttgacggccgaccagccgattagcgcagggagaaatgcgaaagcagtccccgcgatcaagttaatcatattagcgagatccgcccattgcggatagacttcaacgattgattttccgctgaagaaaatgtcttgagccgtcaggatattgttgatccccatcagcagcccggcagtgacaatcgccggcaatattggaataaatatatctgcaagcgttttcacggcacgctgtaaaggattcatatttttctctgaggctttcttaacatcatcctttgacgattcgccgattcctgttgccttcaccagctccgcgtacacattgttgaccgttccttggccgatcaccacttgaaattggccgttagtcgaaaacgatcctttgacaacatctatttgctccagcacctcttgattgactttgctttcatcgagcaatgcaaatcgcaaacgcgttacacaatgggttaccgctgcaatgttgtcagcaccgccgacagcatcgacaatccgtcgcgctgattgattcaaatcagtcattccaatccctccttctcctcttataacctgtatatacatgttataggtatattgtattcctgtatatacaagtagtcaatatatttttgtagcgctttcaaaaattaaaaaagccggatgttcccttcataaaacgtaggagagcaaggcttcctccgatttatgagccgggaacaaaccggctgtgatcataaattgttcactttttcgtcaccttcataaacgccgtcctgctgaccgatgtctttcaaataatacttttctgatgtaaaaaactcatcatataaagaccttacttttctgctcaagagcagcaccgccaaaatattcggaagaagaatgaaaacgagcgcgagatcgaggaatccccatatcgcctttgctcctccggcagcaccgatgacgacggcggccaggtagatgaatttaatcacatgtcccgcgagccgtccgaacagaaattcagcttgttttacaccgtaaaaaatgaccactgtgatcgttgataagacaaagaaaacgagcgagacagagacgaagtatccgcccacagggccaaaatagctgcgaaatgcggctgcggccagcgcccccggatcgcttgatgcgttttcgccggtccagacgcctgatgcgagcacgacgaaggcggtggtcgtgcaaatcagcagcgtatcgaccacgatgccgatcaccgcccagaacccctgtctcacagggtggtcggtcatcgccgctgcgtgggcaatcggcgccgtccccatcccggcttcgttggaataaaggcctcgtgcaaacccccagcgaacggtttcggcaactgccgcacctgcaaagccgccgaatgccgaagaagatgtaaacgcattcgaaaagatgagagagaaaaaagcgggtacagaggaaaggtttgtgacgacaatcaggaaaccggccccgatgtacgcccctgccataagcggaactgcgagctccgtcacttttccaatccgtttaatccctccgatcaccactaaaccgatcaaaaaagcaatcccgattccggtgtataaacgattgaacgagaacgtctcagccagcgatgcggaaaccgaatttccctgcaccatgatgctcggtacaagttcgatcatcagcgctactgaaaaaaagacgccgagccatttcatggagagcccttttgtaatgtaatacatcggtccaccgacatattcgccttcttcatttttttctctgtagtggacggcgaggacgctttccgaaaacttgatcgccatggcaaacagcgcgaccagccacatccaaaaaacggctcccggaccgccgaacatgatggccgcaggcacaccgacgatattggcggcgccgactgttgagctgagagccgatgtcaaagcctgcagcggtgtaaccgtcccttctcctttcggctttttgccgacacttccgatcgtctgcttaaagatatagagaggatagcgaaattgaaaaaatttcagcaggatcgtcaagtagactcctgtccctgtcagcagtatgatcagcggtggcccccacagccaatctgatatgtattcaacccaattcaataatcgttccatcctatcacccttttgttcgtttacgggtcaataccactacaggggagaaataaacctgcttttagcgctttttatttccgctcagccttcggtacactttttctttataaaacgctgaggcaggcttggaaaacatgccttttttgtcggcgagcctgtcgagcctgagccgggtttctgtttttctctcaattaaacgctcgcgctcgtcttcatccgcgcactttgcgattaagtcgtcaatcgtcatcagttctttctttaaagcgccttcatcccccgccattccggcgtttttcatcactctgtaagccatgcggagatgctctggaacatgggcggcatcgtcttttttcaaaggtttccccattcccggaagcccttcgaattcgccgtccttaatggcctgcttaatcttgtcttcagaaacgatgctcgaaaaatccatggtctaaatcctcccttttcgttcatatactaacaacagtctgccataaagatcagttcccgccaatgcaatacaagcgtaaaatattcccaaacatcttttttaaagctgtaaaaccctgatttgacaggggttttgcgatttttttcgcaaggccggtttccgcttttctaaatcggtatttcatggtatattttatacattcgtttttttctttcgttccgatggtttttactgatccggaaaaaaggagtgtaacaattgaaaagatttattaaggaaagaggccttgccttcttcctgatagccgctatattgctatggctaaaaacttatgctgcgtatgtaattgaatttaatttaggaataaccaacacagtacaacacattttgctttttgtgaatccgattagctcaagcttgttctttcttggattgggactcttgttcaagaaaaaaatacagcagacagcgattatagtgattcattttttaatgtcttttttgctatatgcgaacgttgtatactacagatttttcagcgactttatcacgctgcctgcaatcatgcaggcaaaaacaaacggaggacagctcggggacagcatcttctcgcttatgcacccgcttgatgttctgtatttcatcgacacctttattttaatcgggctggctgttttctataacagaccatctgaaacaacaacgaagcgtccgtttaaaattgtgatgggagcaagcatcctcgtcttcctcgccaacctggccgttgccgagatcgatcgtccggagcttctgacccgttcttttgaccgcaactaccttgtgaaatatttgggaacctacaacttcacaatctatgatgcggtgcaaaatatcaagtcaaacagccagcgcgcactggcaagttccagcgacgtaacggaagttgagaactatattaaagccaatcatgataagccgaatgccgaatacttcggaaaagcgaaaggcatgaacgtggtttacatttcactggaatcacttcagaccttcctgatcgattataagctcgacggcaaagaagtcacgccattcttaaattcactggcgcacgacaatgaaacgttttatttcgataactttttccaccaaaccggacaaggtaaaacgtccgacgccgaatttatgatggacaactcgctgtatcctttatcgcaagggtcagtgttcattaataaagcgcaaaacacgctgcagtcggctccggccattttgaagtctcaaggctatacatcagcggcgttccacggcaactacaaaacgttctggaaccgcaatgaaatgtataaagccatcggttatgacaaattctttgacgctacgtattacgatatgagcgaagataaaacgaaaaactacgggttgaaagataaaccgttctttgaagaatcaatgccgctgttgaaaagcctgaaacagccgttctatacgaagtttatcaccctttcgaaccattttccgttcgagatggatgaaggcgatacagacttccctgccggggataccggcgacagcgtcgttgaccattatttccagtcggccaactacatggaccaggcgcttgaacaattcttcaacgacctgaaaaaagccggactgtatgataatacgattgtcgtcatgtacggggaccactacggtatttctgaaaatcacaacaaagcgatggccaaagttttgggcaaagacatcacaccatatgaaaacgcccaattgcaaagggtgccgctgttcatccacgcgcctggggtcaagggaatcaaatcccataaatacggcggcgaagtcgatgtagcccctaccctgcttcatttgatgggcgtgaatacgaaagattacctgatgagcggttcagaccttctgtcaccggaacaccgtgaaattattccgttccgcaacggcgatttcgtctctccggaatatacgaaaacgaacggaaactactatgacacgaaaacaggagagctactgaacgaaaaagacatcgatccgaacatcgaagaggccgtgaaaaaagaactcgaaatgtcggataaaatcgtcgacggagatttgctgcgcttctataaaccgaagggctttaaagcgatcaatccgagcgactacgactataccaaccacaatccgaaaacatcagaatctgatgcggcgcaaacaacgaaatcggattccggacaataaacagacagcacccgcttctaaataagcgggtgctttttttgtcttgaagccgctctgttcctttttcgcaaacaaatatggtaagcttgaaatggaatataaaaaaagaaagcgggaatgaattgtgattgtaacgaatgaccaagagctggaagggctcaagaaaatcggcagaatcgtcgctttagccagggaggaaatgaaggcaaaagcagctcccggcatgagcacaaaagagctggatctcatcggaaaagaagtgcttgaagcccatggcgccgcatcggctccggaaaaagaatacgacttcccgggaacgacgtgcatcagtgtgaacgatgaagtcgcccacggcatcccaagcgaatccagaattttaaaagaaggggatttgatcaacatcgacatctccgctgaatttggcggctactattctgatacgggcatttcttttgtactcggaaaaggcgatgaaatgctgcacaagctttgccaaagtgcggaaagcgcttttcaaaaggggcttttgcaggcgcgcgccggcaagaaacaaaaccaaatcggcagagccgtatacaatgaagcaaaagcaaacggatttaccgtcattaaaaacctgacgggacacgggattggaaggaacctccatgaagcgcccaaccatatcttaaattactatgacccgtttgataatgcgctctttaaaaacggaaccgtcatcgcccttgagccgtttgtttccacaaaagcagaacataccatcgaagccggagacggctggacattcaaaacgcctgacggcagctttgtggcgcagatcgagcatacgatcgtcatcacgaaaaacgaaccgatcattttaacacagcttgactgattacgcataaaaaagcccggctcatagaagcgcgggcttttatgctaaaataaaagacaaactgtgccgaaaggagctttaccgcatgctgtttgccatcatcgggctgatcttttttatcgagagcatcctgttaatcgtatatgctcataaaaaaaagaacggcttcttaaaatatattgggatcgtcctcagcatcgcgatcattgtgatgatcgtcaccagtttgacacacggctgacgcctgccctcaaacttccagactatgtcgaaagactcagtttttaaaaattgccgcctatcccttttcagcgtttttctatagatgttagaatcccaattgcatcgaaatatagaagggagttttctgccatgcattacggaagcaaaggctggtatgtagaagaactgaaaaagctgggaatgacgaagtatgaaggaagaaagcttcaaagctataaaaaacactttttggccaacctgcttgaaagcgtcaaaaaataaacatcctttaagctcagcgtgacccgcaacccttgcagtctaggaaggccgagcatcgaagcagactttcacaggaggtgattacggcggcgttcaggcaggacgcctggcggttagccgccgatccttcctctattcgtgagcaccgacttagcaggcctgacaacgaatgcgagggtttgtcgacacgctgaaagccgtattcctcttcagacacggcttgtttttatgcgctcagctgctttaaaaatgagcttctccagctttccgacagcgcttcaacctcaaggatcttccgaatggctgggtgattgcccatgtcatggtacatcaaatgattggcatacgagaccgtggcttcatgcgcatctcttgaaacgagctgcagccgcgaatcaggcgcaacaattccttcttcgagaaccctgaaatagaatccgctgtacccggtgtccctcacttttaacaccatatctttttgattcagacgtttggccagcttgaaacaaggctggcgcggctggctgacttgaacaagagcttcccccagcttaaagatatcgccgatgcacacttctttttcggtgagccctttaactgtcacgttttctccaaatgccgcctctggcagctttcgcttcaagacgctttcccaatacatgtagtgatccgccggatagacgcaaaccgctttatcctctcccccgtggtgaatcagatccgcctgcccgtccccttcaaaattcgtacggctcaaatagacaggtccgctgacaggctccttcacgattgccgtttccacctgcttaccgtcgaattcgtatgtacgcggacggcctacatgaatagatatgatttcatactcctgattttccaaaacctcacgcccttcctttattttcatattttaacgattcatccgaagcatgtctatcccatgatctcaaaatgggaaatatggtagcataaaagaaaaggggtgttctcgatgcttcaatacagaatcattgtagacggacgcgttcagggcgtgggatttcgctattttgttcaaatggaagcagataaacacaaattgacaggctgggttcgaaaccgcgacgacggcacagttgaaatccgcgccgagggacttgaggaaagcctgaagcaatttttaaaagcaattcaaaaaggaagtccattctcaaaagtaacggatgtaaaagtggaagaaaccaaagaattggacggattccaaaagtttaatatcagctattgagaaatccgccggagatggcggatttttttaataaatcttgactaaatttttcttttattttagtatttagttaaataactaaatacttattctaaggatgctaaatatgaatcaaacctttaaagctctagctgatccgacgagaagaaagattttgaacctgctgaaggaccgggatatgaccgccggtgaaatttccgaccagtttcaaatgtctaaaccaagtatttctcagcatttaaaaattttaaaacaggctgaattaattcaggatgaaaaaaaaggccaatacatcatctactcgctaaacactacaatgtttcaagaaatcatcggctgggctttcagttttactgaacaagccggcaaagataaaggggatgcaaaatgagaaaacacattttttcgctcgctataatcgctatgaatctaatcatgtgggcaatcgcttatccgcacatttccggtcaagttccaatccattggtcatcttcgggggaaatcgacaggtatgcttccaaaatggaagcgatgcttgccatgattgggctgctcgtttttgtatatgtcttgatgttcttaacgccgaaaatcgatccgcgcagaaaaaactatcagcttttttcgaagacttattacattctcatcaatgccatgctgcttatattttctctgatcaacgtgcttgttatcatgaccgggctcgggtatgatctgccggcgggcagcatcgtaccggttcttgtaggcgctctattaatcgtcataggcaattacctaccgagagtccgctccaacttttttttcgggatcaagaacccttggacattgagcagtgattcaatctggaaaaaaacccacagatttgcggcgaaagtatttactttggcaggacttctaatagctgcggacgggttgttatcaatcagtccagaaatcatgcttccggttattttggcaacggttttggcgccctatatttattcttatgttttgtaccggaaggaaatcaatatgaaaagctgagacgattcaaaaaggctccgatttggagccttttagcttctcctcagaaaaggcggcattgttgggtagccgcttttcctgaggattttatttgttaaggtaaggcttttcctgataaaagtaattcggtttcagcgttttattttcataatagctgtgaaagatatgggtcgctgccggcgataacggcggaatcagccacgtccagcttgctgcaagctcccttccggcttcagcctcctgctcctcgaaccgcttgaattggcttgccgcagtatggtggtcgacgatgctgacgccggcttttttataggagtgaagcaccgcagtatttaattcaacaagcgccttgtctttccacagcgaagtattccgctccgtatcaagccccataatggctgccactttttcgagcgcattatagcggtctgcatccgcgaggttgcgcgctccgatttcagttcccatataccagccgttaaacggggcggcattataatgaatccctccgacttccagcttcatatcggctataatcggtacagcgtaccacttcagccccaaacttttgaagccttcaatctccggatgttcaatccgaacctctttgacgatttcacgaggcagctcataccacacaggaggacgcccatctatttgaaaaacaagcggcaatacgtcaaaaggcgtaccttcgcctttccagccgagcgcttcacacgcctttgtcagttccaatgacgccggatcgccgataacgccttgctcagtttcataccccgcatacctgatcagctggtggttccaaatggacacttttttttgtccgttttgttccggggggaaaaccgtaatgaacggtctgattttccctccgtttgttgcaagctgaatatggtggaaaagcgcatcccgcacctctgcctcggtttgaacgcctctttgatcgatgacagtaagagagtgccaaaacagcctgccgatgcagcggctgctgtttctccacgccattctggctccatgttcgatttcttctaatgtatgtgtatagcttccggtttctctgatttctttatctattttatgtaagcgcatccttgtttcttcttcggacttcgacagttccccgtagcagagctcgatgaaggccttggcttccctccataattcttcatgtgattccaaccggattctctccttccagatttcagactgatatttattgtataggtttcgatctcagtttaaaacaattatgtatgaaaaaacaaaaaaccgctaaaaagcatccgtcaaagacggatgcctggtgattattccttaaaattaagcgttttggtgttcagcatgaagcggtaaaccggcagctctttgcctttttgagaaggaatgtaacctgtgcttacataactgtcaaccgactccggctcaagtgcgattgacagcagattgctttgctgctgagctgtaaaatagatttttgttcctttaggaaactcttttttctgttttttgagcttcgtttctaccttgatcactggccggccctcagattctcccgctgtttctttcgataaaacctcatacgcttcagcggtgagtttttgtttgaaagccagtgtcacgctctttaatccctgatccttcagcttctgttcgatatcttgatggcccggaaggacaaggtaagcggtcggccgagttcttgacagcacaggaacggcctctgaggcgctgtaatattggacaggaacgtcaactgcttgtcctgaggcaatatcagcgactttaagcgtgtctttaaacgggcctgcaaactcactgttgatgaccacttggtctttatcgctcactttagcgccgttttgtatcagctttaatttttctttggagacaaggcgcttgatctcggctgcatgcttcactgtcgtgtcgatgatcgtctcatgtgtagcaacctgagccgcgactcttcttgcaaaattttcgcgtccgatgtctattcccctgctttccaccaggaaggaaagggcaggctggagggcgaatgcattacgcccgattctcgcttctgtaccgccttcatagatttcgatttttccgtccttgctttttcctgtcgtataataagcatcattagaaaatcctttttcatcaagtttagctctgacgccgttcacataaaggctgtcggacgcatgcctgatcgacttgggaatgtttaaattttttcctgataaaattaaaatatcatggtattttaatgaccctttttcgcctatgctctgaaattcgttttggccgacaccgtattcatgggcatcgataacgacttcaggcgaatacttattgaattcttggtgaatggcgcgcacttctggagactcgagcttgacatgatccctgtttccgtcgattccgttcgccagccgtctgttgaactgatatgatccgtcaggattgacccgcggaacaacgatgacattgatcttgtccaacactttgtcgccatacggtccggccagtttttcagctatcgccagagcagattctcccgctgccggctcatttccatgtatctgtccttgcagccagacggttggtttttttgatatggaacgtatttgcttgtcctttgtgaagtaaagcacaggaatatttcttttttcaattgaaaaaccgatattcccgattttgacattcgggcttttctttgtcagactggttataaacttcatcatttcttcttgtgtcgtaaaggcttccccttcttttacaaaagcaggggttgagaatgtttcttcaggctccggatataatgatgacacttgctctggctgagtatagttctttccatagtaaggggtttccgcagcgtacaccgcatcggacagcatcagtcctgcaaacattgccgaagttgccagcaaagcttggacccttttttgaattttcatcttttctcagctcctttcaggcatacctgcattataaatgaaatatcaacatattttgtctaaaatttcagaaaatgattcctttggtatacatcaacatccggaatttagaacaatggacggccatcatcacatgtaaaatggttagtttttccctataaaaaaacattcagcctggctgaatgttttaagcgcagcatatgacaatttacgaatcagaggcgggcaagcggtctgatagatcaaggagcgcttcggaaaaatcgcttcctttcatcggtacaccgtgtcccgtcaataatgcagccggttttaatcctgccagcttccgaaccgaatctgctgcttttgtccaatccattgtgaaataagccggcggtccgttcagctcctgcttttgaattgccacttcaaatagagactcctgctcaacagttgtaacggcgtcccctgcgatcaaggttctgtccgactgccggaaaagcgaaacatgccccggtgtatggcccggcgtctcaatccatttccatccttcaagaaacggaagcgaaccatctttattaagctgctttacatggaacgaaatgttgatggagtgcctcggaaataacggagacatctttgcaaccagcccgcttttcacttgcggttttgcaggcggataatcggcttttcccattaaataaggcatttctttctcatgggcgtaaactggaaccggccatgtttcgagaagactttccaaagcgccgacatggtcgaaatgtccgtgtgtcaaaacgattcctttaagccgaaaatcgccaaaccgctctttcgcctctcttaaaatgaatggagcggacttgggcataccggcatcgattaaaacggcttcccgcgaatcgggatcgaaaataaaatacacattgacgatttgcaccgtcaaaccaaatacaccttcggcatactcctccaggaccccgctgttaacggatgtcaaaggcatgtaaggatcactcatcatgttcaccactctcacctattatgtattttattattttgcacatttgactgggagatatgcatcgatgagcacctttgaaaaaaatgaaggagggacaaaccaatggcagatagtcagtggtttactgtgacagagcttgatgaatccacatatgcgatcagcgaatacgggcattgggaaaaagtacactcttatttgcttataggggcgaaggatgccgttttaattgatacgggtcttggcatcggcagcatgaagacggtgacggacggtctgaccgatctgccggtcagcgtcatcacaacccatgtccattgggatcacatcggaagccacgatgaatatcagcgcatttacgtccatgaagctgagagagaatggctgacggacggaatcaaaggacttccgatcgagcaaattcgccgcgatgtctcgagagatatcaccaagcctgttccggccggcttttccgctgaaacatacaccccgttcagaggcgaaccgtcgggaacgctgcaagacggagatacggtcggctgcgactcaaggccgcttgttatttatcatacgcctggacactccccggggcatatttgcatctttgatccagcgtcaggctacttgtttaccggcgatctgctgtataccggagctccaatctatgcattctatccgacgactgatccggctcaactggttcagtcgcttgaaaaagtttcggctatcgggcgcgtaaaaaaggttttcggcgggcatcatcagctcggtcttgctcctgacattttagaggaagccggacatgcggcacggcacttgaagaaacacggactggcacagcacggcacaggcatgcaccgatttaagagcctgagctttcaattttaactaaaaaagatgattgcctagccgggaaccaactttcgcgctttcttcaaaaatgcagacctttcctgcgggaatctgatcctttagctccgaacatgaaagacgtcaggcagaaaccgattacaccgccggccgtatttaaaattaaatcatccacattaaaggttctcgccattattaatcctgtcacagacagcacaagctggagactctcaatcaaaaagctcgtcaaaaaaacaaaaactgccgcttttttaagcgaagtttttctccatagaacggaaagatacacacctaaaggaatgagcaataaaacattaaaaaatgtaagcttgacggaattccaaaaaaacaatcaaagccgctctgctgatacatttgcacccattcagtgacaaaataaaacggaatgagctgaatgttcatttgagcgtatgccggctgcggcggaatgttgattccgcctatcgtatagtgataaacggcgctcaaataaacaataaaactggcaaacactatttttctaaaaaaacttgtcttttttcggtttttcacaatgtcgtacaaaaagtagacgatcgcatacaagaaaccgagcagcatgaaatcaactgaccaaaacattaacgttcacccccttacgttcggtgtatttaaacaaaccctttctagactacaaatcgtggaatttcaaatcaacagcgtcgatatgaacataaaaagaaggacaggatctctcccgcccttcattttaccatatgcccagtaatttccaccataaccctccgacaacaagccatgtcacaatatgaacaatcgacaagatgaagccgattgaccaccatttgctttgcggaatatagccggccccgaaaaagacgggagccgctcccgctccgtaatgcgttgtcgaagcaaaaaggttgctgaaaaacgcaaggcttaatgctgcgagaagcggcggagcgcctgcagcgataatcacggcgagaaaggccgaatacatcgcgctgatatgagcggttgcactcgcaaagaaataatgcgaataatagtaaaccgcaattaaaatgagaaatgcgctgatccaggagaatcctgaaacatacgatttcatcgcatcgctgaaccagccgaccatgccgagttcattcaagaagctcgccagcatgacgagcgcggcaaaccatgtcagcgtatcccatgcgccttgctctttcttaatatcgtcccacgtcagaacctgtgtcaaaagcaggacggctaaaccgatcaatgccgttgttgtcgcgtcaatattcaggttgcctccgaaaatccataaaaaaaggacgagcaaaaagaccgcgaccatagagagttccgattttttgaacgggcccatttctttgagcttctctgttgcgattttcgccgcatcaggcgtttctttcacctcaggtggatacagtttataaatgacaagcggggtgatgatcaagctgacaagtcccgggacgatggccgccacagcccagcttgtccaggtcagattcacacctgccacatcatgggcaagtttggcaatcagcgggtttgccgccatagccgttaagaacatcgcagaagtgatcaagttcccctgaaagcccaccttcagcaagaaagcgccgatgcgccgttccgtgccgtccttgggcgtcgactgaaaagtttcggataacgaacggataatcggaaaaataattcccccggcacgtgcggtattactcgggatcgccggcgataaaatcaaatcgctgacaaggagtgaatacgagagtccgagtgtttttttgccgaacatccgtacaaataaataggcgattcgcgcacctaaaccggttttaataaatccccgcgaaataaaaaaggcaatgacgatcagccaaatcgtcttgtttccaaacccgctgagcgtttcttcaatcgacagcgttccagtgagcgccgtgatcgccaatgcgaatacggcgattgcccccatcggcagcggttttgatataaagccgataatcgttgccacaaagattgcaaataagtgccatgctttcgggtccaatccggcgggcgacggaataaaccaaataaccgctccgactaaaatcgtgaccgcaagaggaatgatgttcagtgccgatttttgttctgcatctttttctttagccacagcttttcctcctattcatatcgttttcgtttattattctactcctttcaagctatcattcaaattttattttattaaaaaaactgccgaccatgtcggcagttgcaaattatacccaggatttcactttttcatgatccgtaacgaagaggaggacttttccttcatcaagctgtttctcgaattgttctgcttcttgttttgaaaagccgatctcatgaattttattgcggagctcgtccccttttttgttgaagatattgccgacggcatttttgatgcctgtctcttcggctccaatcgtattggcatccgcgttgtctgcaagtctttcagtacggtcgtcgtcatgtgacaaaacgtaaatatcttctcttgcaactccgatttccctgagttcctcaacatccttcatcagtttttcatcgtttgtatattgtcttactactggtttcatatgaatctcctccctttttcatgttgtatttaaaacttaccctttgttcacacggctaaacggaggaatgctctgtcatgacattttcatttcaatgttacaattgttataaattttcagacaaaatgtttgaaagggttgccaattcaggtacattaacaaatagacaaggcttttagatggggtgatttagcgtgtattatttttcaccggaacagcaatacaacgcatggatcattagcgatttggtcaagcagattttttcaagagagggtcatcaggaagctgatactcatcgatttgaatcatttgccgccagacgattcggcatcaatatcgattatgtcttttcgatcatcatgaacatcggcgatccggaagaaaggagaacggcaagcagcaccgaagacctcctctcttcttatctcctgtcattgcttccttttatcacaaaagacatgttccaatattcaagagaaaatgccaatcaatatcttttaaatgaaagaaatgccgatgtttttcacctttttctgcccgattctgtactgaagaaaacatttcgtgcaatccgctgatcttttgctaaacctcttttttacgtggtaagttataagtaaaaggaggaatcattatgccgcaaaagcaaattgaacttgcaagacgtccgcagggcatacctgttatggacgatttccgcataaaagaaacggaaattccggaagcaaaaaacggtgaagcgcttgtaaaaacgctttatgtctcagtggacccttatatgaggggaagaatgcaggatacgaaatcctatgtcgagccatttccgcttgatgaagtgatcaccgggggcgtgatcggcgaagtgatatctgcaaaaggagacaagctcaaaaaaggggatattgttttgggccgcttgggctggcaggagtattcagcggttcgcgaagacaatctccagaaaatcgatccgtccctcgcacctgttaccgcttttcttggaattctcggcatgaccggtttgacggcctatttcggacttctggacatcggacagccaaaagccggtgaaacggttgttgtctccggggccgccggagcagtcggctccgccgtcggacaaatcgccaaaatcaaaggggcaagagtcgtcggaattgcgggctctgatgaaaaaacggcatatttaaaagaaaagctcggttttgatgaagcaatcaattataaaacaacggaaaatatggcttcagcgcttgaacaagcttgcccggacggtgtcgatgtttactttgacaacgtcggtggcgcgatttcagatgccgtcttcaccctgatcaataagtttgcacgaattccagtctgcggggcgatttcttcttataacgtcaaaagcgcagaagaagatatgggaccgcgcgtacaaacggccttgattaaatcaagcgccctgatgaagggatttgtcgtaaacgattacagggaccgctttcctgaaggaatcaaacagctcgccgaatgggtgaaaagcggacagcttcaatatgaggaaacgataacagaaggtttcgagcggatacctgaggcatttttaggcttgtttgaaggaaaaaacctcggcaagcagctgatcaaagtcgccgattccgacaatgcctgagcattcatataaaaagaggcctgccggcggcaggcctcttttcttatctttcaataatccgtcctctttcatacacgatccgctgaagcggaatttcaagcttcttcgccagctttttcagcctttcttcttcaatgcggttgacaaggctgatcacggttccttcattccccgctcttcccgtccttcccgaccggtggatatagccttcaacgtttggcaaatcggcgtggatgacataagggagatcttcgatgtcgatcccgcgcgctgcgatatcggtcgcgagaagcagtgtgaactctcccgcctcaaatgcctgcaatattttggcgcgctcaatttttttcgcctcgctgtgaaggacgccgatttctacatgatgaaatttgagcttttcggcatatacgtttaaattgccgatgtctttaacaaagacgagcgcctgcatgcctggaagccgagagaatttctgcagaattttcaccttatcccgctggtcgcatacgagaaattgatgtttgacttttgccgattcttctttcgacctcttgatcttgagaacttccgcatccttggtcatttcacgaagctcgcgttcggcatcgtcttttaaagtcgccgaaaaacagaggagctgcctgtcgcggagcgtcgatttgatgatgctttgtatcgtcccgcggtgctccggcgtaagcagatgatcggtttcgtcaaggacgatcgttttcacttcgtgcattttcagctttttcattttaatcagctcaaatacgcgtccaggcgtacctgcaatgatgtgcgggtgttttttcagcttttcctgctgctttttgatattggcgccgccgatcagggaagcggctctgatatcagagccttttttccattcaacgatcacatcaaaaatctgcatgacaagctcgcgggatggagccagaatcacagcttgcacgttcttttgatccgcctccagcttttccagaatcggcaggacgtatgcgagcgttttgcccgttccagtcggcgactcggcgatcacgtcacgcccgtccaaaatcagatcgaccgcgtttttttggacattcgtcggatcttgaaagcccgacgccttccagttttcttgaataaacggttttgctttatttaaaaatggccatctttctgtcatgtttttctccttttatcaggttgattctgctcctagtatctcaaaacaaaagcggcttcgcaatttttcttttattgttccctccgagttcgatataatcttatagaatacagattatatttcttgaggtgcaaaacatgagtttacttacagttacaaagctgagccacggttttggcgaccgggcgatctttcatgatatatcctttcgcttgctgaaaggcgaacatgtcggtctcatcggagcaaacggcgaaggaaaatcgaccttcatgaatatcattacgggcaaacttgagcctgacgaaggaaaagtagaatggtcaaaaaacgtccgggtcggctatcttgaccagcatacatcgcttgagcgcggacaaacgatccgcgatgtgctgagaaacgctttccattatttatttgcgatggaagaagaagtgaatgccatctacacaaaaatgggcgaggccgaccccgacgagcttgaaaagcttctcgaagaagtcggaacgattcaggacgccctgaccaacaacgacttttacgcgattgacgcaaaagttgaagaaatcgcccgcggcctcgggctcaacgatctcggacttgacagggatgtcgcggaattgagcggcggtcagcggacaaaggtgctgctcgccaaactgctcttggaaaagcccgacatcctgctgctcgatgagccgacaaactatctggacgaacagcatatcgaatggctgaaacgctatttgcaggagtacgagaacgcctttattttgatttctcacgacattccgtttttaaacagcgtcatcaatctgatctaccatgtggaaaaccaggagctgacccgctatgtcggcgactacaaccaattccgcgaagtatatgaagtgaaaaaacaacagcttgaagccgcctacaaaaaacagcagcaggagatttcagagctgaaagacttcgtcgcccgcaacaaagcgcgcgtcagcacaagaaatatggcaatgtcacggcaaaaaaagctcgataaaatggatatgatcgagctcccttcggaaaaaccgaagcctgaatttcactttaaacaagcaagaacatccggaaagctgatttttgaaacgaaggagctcgtcatcggctatgatgagccgttgtcccgcccgctgaacttgagaatggagcgcggccaaaaaatcgctctgtacggagccaacggcattggaaaaacgacattgctgaaaagcctcctgggggaaatttcaccgctgtcgggagaagtcgaacgcggcgaacaccttcatatcggctatttcgagcaggaagtcaaagagaccaacaacaacacatgcatagaagaagtgtggaacgacttcccgtcctttacacagtacgaaatccgcgcggccctggcgaagtgcgggctgacgacaaagcatatcgaaagcagggtttccgtattaagcggaggggaaaaagcaaaagtcagactatgcaagcttatcaattcagaaacgaatctgcttgtactcgatgaaccgacaaaccaccttgatgttgaagcaaaagaagaattaaaaagagctttgaaagaatacaaaggctctgtcctgctcatctctcacgaacctgaattctatatggacatagcgacagaaacatggaattgcgagtcatggacaacgaaagttttataaacaaaaaagcttgtttccttttagggaaacaagcttttttcattaatgaccggctttgatgcccgccaaataacggcggcctccagccaagacggcgatgccggcaagcacggcgatgcatcctgcaaaatatggagtatgcgcagtaaaatgatcggctaacacaccggcgatccaaggcgcaatggccccgccgatgaaccggatggagctgtaggcagatgaagcaacagaccgttcgacaggcgcggcttccatcaccgcggttgtcaaaatcgtattgatcatgccaagaatacctccggctatgatgatcgccccgatgacgagcgccatgtgctccgtccaaatcccgatcgcgagcaaatcagctgcaaacagcataaacagaaggatcagagatcggacggttccgaagatccgctgtacggccggagcgataaaaacggaagtgatcgcaagaaacagcccccagccgaaaaagacatagccgaggccccgttcatttaagtcaagaacaaacggcgaatatgcaagcagggtgaagaaaccgaaattatataagaatgcggctcctgacagcgtcaacagccctttataacgaagcgctttgatcggcgcactgacggaaattttcttctgcggcttttggacaggcggcaaaagaaaaaagatggccaaaagagcagcggccattaaaaccgatacaccgaaaaacggcgctctccacgatatcgtgccaagctctccgccggcaagcggtccaaccgaaatgcccaatcccaaagcagcctcatacaaaataatggcttttgcgcttccgccagaagccacgctgacaatgacggcaagcgcagtggagataaacatggcgtttccgagtccccagccgccgcggaagccgacaagctgagagatggaatgcgagagcccgcccaggcccgcaaagacgatgatcaggatcaaaccgctgattaacgtcagctttgctccaatccggctcgagacagcgcctgataaaagcatggcaaaacctgtgactaacagatagcttgtaaataaaagcgaaacctggctgggggaagcatgcagctgctgcgcgatcgccggcagaatcggatcgacgagcccgatccccataaacgagatcacgcaggcaaaggctaccgcccagaccgcttttggctgtttaaacatactggagttctcaggtggttgttcattcattatctatcaaaccttctttccaaataaagaaacgctatgaaaatagcgtttgtcttgtttaatcaattgattgtagggcattctcggcttttgcctgcataccttccaagcgcttcttgaatgattgaaatttttcaatcttttcatcaatcattctcatctgttcattcagcatcctctgaatgtcttcaagcttttcttttcgttcccgtttatccagcgacaataggtatccttctttattcatctccaggtgcttgcccgtttccatgaactgctggagctcctgcagcgagaatcccagcacttccttcgcgctgatcactctttcaagttcctcaagatcgtcttcagagtaaagacggactccgccttccgtccgcttcggtgaagaaagcagaccgatttcttcgtaaaagcggatcgttcttttcgtcaggccgcttcgcttggccatttgatcaatcttcatccactccacgtccatatccccccgagatttttcttcttttctattatactacctttatacttttacgtaaacgttaagttttcgatgcaaaaataaaggaactgacttgacatcttcctgctgttgtaacgtatcatagaaatacatcaaaacaggaggacaaataacaagagtgaacactcatcaaaatcgatattcggttcaaagcaaggtttcggcattgattaattgccggctgtttcagtcattcatcacgacggtcattgtgttgaatgccatctcgatcggtttggaaacttacgctttctttaagccttatcaaaaagtattttttattgtggattgcttgtttttaacgatatttgtaatcgaactttctcttaaactgttcgttcaaaaacagcacttttttaaaaacaactggaacgtttttgacttcgtgatcgtcgccggcagtttgattctttacaatacgaatttcgtcagcgttctccgtattttccgggtgctgcgggtcctgcggacgatcacttcggtcccctcattaagacggatcgtcaacgcgctgtttatggcgattccgaccatcagcagcgtcattatcctgatgagcatcattttttacgtgtacgccgtcatcggtacgatgttcttctccgccatcgcgccggaatacttcggcaacctgcagctcagccttctgacactgtttcaaacctttacgctcgaatcgtgggcaagcggcatattcaggcccatttttgccgagagcggctggtcatggctctatttcgtttcatttatcgtcattgcgactttcattatgatcaacttgatcgtcggggaaatcgtgaataatgcgcaaaaaatttctcaggaaatagaggatgagacaggcgagctgaaagaggatacaaaagaaatcaaagaactgcgcgcagaagtcaaagaattaaaggcgcttctgcaaacctatattacccaaaatgaaaagaaagattaaaaagggccggcacctgtaagccagccccttttttcgtcgtctttaattgaggatgacaggcagctcggccagcgatctaaagccgattagcctgcgaaatggaacgtctgttgaagcaagcttcaagttaggcagccgcgccaacagtgcgggaatggcaatttgcgcttcgagccgcgccaatgccgagcctaaacatacgtgcgcaccggctccaaaggcaaggtgcggattcggctttcttgtgatgtcaaatagatgcgggttttgaaatatctttggatcgcggttggcggcgcctaaaaggatatataagtgctctccttttttgatgattttcccgttgatttcgcagtcctccgacgcggtgcgcgctgtcagctgtgtcgggctttcatagcgaagacattcttcgacggccgactcaatcagcagcggattttctttcagctcactgagctggtcaggatgtgtcatgagcaaaaacaacccgttcgtcaaaaggttgactgtcgtctcatgtccggcaatcacaagcaggatgcacgtcgcaagcacttcttcatcagcaagctgctcatgaccggcgaatgtgctgatcaggtcttcagaaggatgcgcttttcgcttttcaattaaatttttaaaataagccgtcagcttggcaacggtatcaccgccttttgccattacctttcgtgtacgggtcaaatcgatcgtttgaatgagatccgccgtccattgcctgaattggtacctttcctcttccgggacgccgagcatgccggcaatgataaggcttgccaaaggaaaggcgaattccgataccatgtccgccgtcttcttgttttcaagctgatcgagcaattcatggacggtttcttctatagcagggcggaaagttgccgtcttctgcggcatgaattctttgccggcaatcgtccgcatccgcttatggccggactcattttgaaacagcatcatatttcgctgcaatcgctgaagttgttcatatttagtagaagcttctgggagaggaacgcggtttataaatgccggttccttcaaaatcgctgccgcttcttcatatccggtgacataccagcccggatgctttaaaacggttcctttatatacaggatgaatggaccgcagctgatcgtaaaacagatatggatctctccaaaaatccgaatccgatttcaggctcggccctgcctcgtgcagttctgtcgtcatgttatatctcccccgtgctaccgctgtaaactggctttcatttcttcgaccgattcgacttcgaaccctaaatcatgaagcatcttatggtcctctgtttcattctgtcctgccgtcgttaaatagtctccgacgaagattgaattggcggcatacagccccaacggctgcaaggagcggaggttgacttcgcgcccccctgaaatgcggatttcctttgtcgggttgataaagcggaacaaagctaaaacctttaaacaataaagcggattcaattcattgaccccttccagcggagtcccgtcgatcgcatgcaaaaaattaactggaatcgagtcggcatccagcgcctttaagcttttcgccatatcaacgacatcctgcttcgtctctttcatcccgacgatgacgcccgaacatggggacatcccggattttttggctgtttccacagtgttcaccctgtcatcatacgtgtgggacgttgtaatatttgaatggttggtttttgatgtattgatgttgtgattgtaccggtctactccggcttccttcagccgctcggcttgcccgggctttagcagtccgaggcatgcgcagatttttaaaccgtacgtttctttgatttctttaacggcgtcgaccacttgatcgacttctctgttggacggtcctctgccgctcgccacgatgcagtatgttccgatatttaaatcgtgcgcacgctttgcgccttcaagcaaggtcgttttgtcgaccatccggtagctgtcgatcggcgcttttgatatcgaagactgcgagcagtagccgcagttttccggacaaaggccggattttgcattcataatcatattgagctttactttttttccgtagtagcgttttctgatttgaaaagcggcatgcataagcagaagaacgtcgtcatccgggcattccaagatggaaagcgcctctttttcagttacttccccgccatccagcacacgttctgcaagttccatccactgattcatttttctgcccccatttgcatttgattcataatcaaggaaacatcgacatgatccttgatcatgtggtgaatttgtgttggtgaagcgtcttcaagcttcggtgtaacgccgaggagcggtacaccgcaaaatctttcaatcatgtccggattcgtctgttcgtcaagtcccggccggctgctgatgccgttgatcacgatgccgatcacgcgtatccccatttgttttgcgtattgggcggttaaatacgtatggttgatcgttccgagattgggacgcgccacaatgacggccggcaaatcgagcgctttgatcaagtcgctgacgaaataatcctccccgagcggcacagcaattccgcctgccccttcaacgatgaagcactcgtgccgatcctttatctttttccaatggttcacggcatcttccagcccgactgtcctcccttcgagcttcgcagctgtgtatggtgcaagcggctctttaaaaataaaaggcgtaacctcttcatcagtaagaggcgtttcagacatgttctttaaaagagctgtatcactctgcggatcgctagcgagctcgccgctcaaaaacggcttaaacacgccgacatctacatgctgctctttcagtaaagcggcaagaccgcaagcgataaacgtcttcccgactcccgtatctgttcccgttacaaaaaaacccttcatttcaccaagttcaactctcttcccattaatttaaacccctctaatagatcttcaatatctttcaacctgcgttctgcggtgacggtcagcctgatccggctctctccttctgcaacagtcggcggtcggatggccggggcttcaatccccttctccttcaggccgtttgcaaattgaacagctttttggggatctccgatcataacgggtatgatcggcgtatcttctccgttgaccgtaaacccgatatccacgagactccgtttgatcgtgttcaccgatgattgcaaaagccggcgtttagcccggctgtcttcgatgatatctaaagctttgcatgccgccgcacagcttgcgggcgggacagccgtttgaaagataaacgttctcgcatgattcagcaaaaaatcgatcaatgttttagaacctgcgacgaagccgccttctgcgcctacagctttacttaacgtaccgatcacaacatcgggagagacgccgaaatactcgctcgttcccctgccggcttctcccaaaacccctgttgcatgggcatcatctacgataacaaaggcccggtactgcttggcgagcagcatgatttcgtcaagcggcgcaatcgtgccgtccatgctgaacacgccgtctgtcacaataaagcggcgtgcacggctctgtgcggcgcggagcttttcttcaagatcattcatatccttgtggcggtaaacaaccgtatcagcttttgaaaggcggcagccgtcgatgatgctggcgtggttcaattgatcgcttaatatgacgtctcctttttcaggcaaagacgaaagcacgccgacattggccaaatatccgcttgaaaacaagagagccgcttccgtctgcttaaaaccggcgattttccgctcaagtttttcatgccatgcggtattgcctgacgtcagccttgatcctgtgcttccggctccaaagcggcggagcgctgtttctgcggcatgaatcagccgtttgtcgttcgccaggcccaaataatcgtttgacgcccaattcgtacgttcagcttgaggcagtttaagcgagcggtaaagcccggctgctttcgtctttgcgagccggctgctgagccattcgtcaatacgcacggcctgtaacctcttgaatcgcttctttcataatcgacaccatggcgcgcaggtcatcggcggtgctggcgagcggaggaagaaatgcgacaacatccccgagcggcctcgtcagcatgccaagctctctcattttcaaagacacccggtatccgattcgctcttcgggcggataaggctgcctcgtttccttcgactgaacgagctcgatcccgctcataaaaccgagctggcggatgtcgccgacatgagggagcgctgccagatcatgaaagagcgattccagtattttcgacttttccgcaacttgagcgacgattttttccgattcgaacaggcgcaaattttccagcgcaacggcacaaccaagctggttccccgtgtatgagtggccgtggaaaaacgttttgagtttgttgtagtcatcatagaacgcctcataaatttcctctgtcgcaaacgttacggcgatcggcaaatagcctccggtaatggcctttccagccgccatcaagtcaggttgaacacgttcatgctcacaggcaaacattttcccggttcggccgaatcctgtcgccacttcatcgacaatcattaaaacgtcatatttcgtgcagagctcccggacgcctgccaaatatccttcaggcatcacgatcatccctgatgccccttgaaccatcgattcgaccgacatcgcggcgatctcatcgtgccgctcgctcaggagccgttcgagttctgcgagacattcatcgcggcactcgtccgggttgccgcttttcgagcggtatacgtatggaacgttcaccttaaagctttcaaacataagcggcccgtatacatggtggaagagctcgattgcaccgacgctgacagcgccgatcgtatcgccgtgatagccgtttttcatcgaaatgaatttttgtttctccggcttgccgatgtttttccaatattgaaaggccatcttcagcgcgatttccattgctgcggcgccgctgtccgaataaaaaacacgcgtcagattttccggcgtgatcttgattaacacctcggcaagttctgtcgccggaacatttgtcattcccagcaatgtcgaatgagcgattttgccgagctgttttttgatggcctcatccagttccttcttgcgatggccatggacattgagccatactgaagaaaatccgtcgtagtacaccctgccgtcgatatctttcagcttgattccctgcccgctttcgatgatcagcgggttttcgtcatagtctttcatttgggtaaaaggcagccaaagatattgtttgcttttctcaacgaatgattgattcatgatttacctcctgaccaatgaatacaggctgtttttccaaatcgtctatgcagctttttacatctgctgatccatcaacaaaaaaaatccggcagccgctttcgtccccatgctctttcatctttgtcatccgctgataacccagctttttagccgcaacatagcccgttatgtaatcagggtcatccgaccagcataattcggcgatgacggccgggtgctcacatacctttgaggcgatggcaagcgcctctttcaaccgtggatttggcggcaccccgcacaaagcggcccacctttgaaaatcggcctccggccaatcgagccgcgagacgcgcactcctttttcttttcttccgtcaatccgccggccggaatgaatatcaaacaaaacggcgcccctcacgccccagtattcggcaatgccttgaaacgctttttcaaccgcgctttccggcacgccggcgcggctgatcagctcacgggcgagcgcttgtccttcttccgctgataccgtttcattcgtttcaatgcgcaaaggttgaacaagctttatcggttcgtttacaagatcgaactgaatttgcataaagtccggcctgccccgcgaatgagacatacctttttccaataaatcgctgacggcatcatttaaaccgatgaaaggcacaagccgctctcctccggatatgtgttttcccccctcttcatggggaccgttctcggaggctctcattctcacactgtaatacgcttcccccttcatgctttcatcccccttcttgttcatatgttaacctattattaattagagttaacattacaataaaatattagtattcctttcctgatatgtcaacatcgcgtccaaaacaccggtttgttggaaataaaaaagacaaaagagatgtctctcttttgtctttttttagaattatctagctctttcaatctgccaatcgaacgggtcagataaaagcgaccagtcggccgccatctccgaatctgttaaaaggcatcgatccgcttctgcggtaatttcagacggcgacagatccaatccgataaagacgagctttgtatggcggtctccgaattcttcattccattcttttaaaagctcagggttctgtctgagaatttgttcctgttccggtttggacagtgcggccacccaataagagatcggttccagcgacacggaaggacccgcctgcgacatcaaaagggcaagggtgttgcgcgtcgcacaccaggctattcctttcgccctgacgacgttttccggcagcgaatgaatccagttataaaaccgctctgtatgaaaaggacggcgcgcttcgtatacaaacgaagatattccgtattcttcagtctcaggcgtatgctggtggtgtccttggtttaattccctgatccagcctgctgaaccgctcgcttcgtcaaaattgaagagaccggtgtttaagatggccttcggatcgacctctcctttgaccgctctgatgatgtttgctttaggctgcaaagttttcagcactttctcaagcttttgcagatcttcctcggagacaaggtcgcatttattcaaaatcagcacatcgcagaactcgatttgatcgatgagcagatcggcgatgtcgcgttcatcctcttcgccgacagcctctttccggtccagcaggctgtcccccgactgaaaatcgtgccaaaaacgattggcgtcgacaaccgtcaccattgtgtccaagcggcagaaccgggtcaaatcaatacccaattcttcgtcgatgtaagagaacgtctgagcgaccgggatcggttcgctgataccggtcgattcgatcacgatataatcaatatttccctgcttcgccagcttttcgacttcaaccagcaaatcctctctgagtgtgcagcaaatgcagccgtttgacatttcgaccagcttttcatccgtcctcgacaggccgccgccttgcttgacaagccctgcatcaatgttgacttcgctcatgtcattaacaataacggcgactttcagcccttggcggttttgcaatatgtgattcagcagcgtcgttttacccgcccccaggtatccgcttaatactgtcacaggaatctttttactcattttttcattctccttcctcttatcaaatcgtaattattacgatttatattttatttcaccacactttatttaaaaatgcaaagcgtcagcttcaagatgatcatgatgatcaaaaccgaaacgactgaagtggccatctgttttcccataatggctgccgccgttttcatccccagttccttggcaattgtccaaaccgtcaccatgcatggagtaaaggttgatgccaagtaaatgagcagaaagagcgttgctcccggcagcatgtcaagaagcgctccattcccttcattgaacaagagaatgccgtctttcctgatcagggaaaaaacaaggccaggcgccgcatcttctggagcgccgaacaggcttaaaacaggcgagacaagcaatgtcacaagacggatgacaccgagttcattcaatacggtcgccgccaggcaaatgatgagaaagatcggcatcgcctgaaagataaattgctgaagcacttcttttactcgaaagacgatccctttccaggacggcttctgcaaaaacgtttgccgtcgctcgaagtaagcggcccatttctgatcgatgcgataccatatccggttatgaacggccgctgcggcaacaagaacagcgaggtaaggaataaacagccactcccttcccgcagcatgaaaaatcgacagcgtcgcaccgatttggtagctgcacgctgatccgaaagaaataaacgatacacagcgctttctcgtacacatgctgcatgaccgcgtctgctgaacggccacgacattgcagccaaatccggtcaaaagcggaactaaatcacggccgttcagaccgatcttccgcatcagcgggtccaatgaatcgacgatccggtcctttaaacccgaatcatccgctgcagcattcgctatagacataaacaaaacgacaggaaacgcccaaacaaacgagtaaatgccaagggataacaggccatagttccccgccaatgccgcgcccagccatgacggcaagcccccgaccgcattttggagcggttcaaccgcccatttgtccgcagattgctgcacccactctgatgtatgataagccaatacgatcggcgccataaacaacaaacataaaagtgcagcgctcactacaggccccgctacgggacgatgaaacacagactgctgaacagccacactttcaagttcaatctgtttcatccgcctccgtttgagcggatgaaattcagcctcttttcttaaaaaagcgatgatccgctcttttttatcgtctgtcacggttctcgtatcaaccagcaggaccgggagactgtgcttggccacttgctcagaaagcttccggcgcatggcgtccgtcattttatcctgaaacgtaacgataaagcagacgcgccgggcttccggcggaatcagctccaagaccgcgttcagctcttcagaaaaatgggtgccgcgcaagacggcaaccacctcatcggccttttcgatctcttttttcagcgctcgtttcgacacgctgccatcctcccgaatgcccggtgtatcaatggcttgccagcccggaaggcttttgatctcccgttcagccgcaaatatcgtcgatcctttcacatttgctgcttcgcctgccctctgatcagtgatcgctgaaaaaagcgttgtttttccgaccgattcgagtccgatgaagagcatgcgctgccgccgcgttggttctttcagcattcacactgcacctcacagcagctcaaatctgtgagaaacatttgattttccctgtattctgtcagcaccttttcatcgatcgaaaaccttcgttttttcaacaaatgctcggcgatgacggcgaatcgctgcctgaatttataaatgaagcaaaagaccgcgttttgatgctgaacgctcggcccgattaaataaagaccgtccgtcacggtcgacatgtcttcatttgttaaaagcggcttgccgttctctccccattcaaacaaatgctcgatttgttttgcgccggaatgaaagcctgtcgcgataatcggccgtgtttccgaacggatcttcctcgcgtctgacaaatataaatcataggctggtccgtttttcgccagtttctctacaacggctttttccaaaaactgaaccttccctttttcatacgcatcttctagacgctcccatgtgtaaggtgaaagcgacctgctcggatcggcttcagcgttttcgcggagcgaattcggcatcacaaccgtcacatcgctgccataggacgccagttgtaccgccgcatccattgcgctctcatagccgcctaccacgtaaaaatgggctttttcaaattggctccatctggcgaccttgctgttgtggatgccaatctctgcaccatgaaacgaatatttcgggaattggaattcaccggctccccaaataacgtctttggccttcatagtgcctttatctgtttcaactgaaaaaccgccgtcgtctttatgaacgctgcgaaccgatgtgccttcttgaattggaagctgaaaatgatcggccaaaagcgccaaataatctccatactcccgtccgctcaagtgctcgcgttgaaaagtaaaggcaggggatgttcccggagcaacagcgtttaaatccaaagccccgaatccctgcccggtaaaggacggcgttatcagtttcatttcttcaggccagcttcggaatgaagctcctgcacggtctttttccaaaatcgtaaacgatttaaaaccgagttttttcagaacgatccccattccaatacctgcgggtcccgctccaacaatgacgatttcgctatgctgcaaaacaaccactccctaaacgaaatcatttcgatttaatttgcatgctttagacatgaccacttgattttatcacagcattgcctcaaaataaataggaactatttctatttactgaagaaaggggtctcatcaatggaacgcaaactgcatttgcccgcaaaacccgaacgccaccgccgcttcggatctgtcgaagccgtgaaaggaataaaaccgactgataaagaacagatgaaggatattcaaaatacaccgaacgactatttttttgacattgaccatgtcggtgtctcaaacgtttcgcatccgattttgattgcttcctcgctcaagccgtttacacaaacgacgatcggcgctttttcctttacgacgagccttgcgcgcgaccgcaaaggaatcaatatgagccgcctgacagaacagctgcagcgctatcacgaagcaaactggacggttgacttccatacactgaaagattttgcaaaggatttagccggcaatatggaacaggaaagcgcatccgtctccgtcagttttccatggtatttcgaacgcatcagcccggaaaccaaattgtccggactgatgcatgccgatatccatatgacagtctcttatcatgaaaacaaaggcttttcgcaaaccgccggcatcaccgcccatgcgacgacgctctgcccttgttcaaaagaaatcagcgaatacagcgcccataaccagcgcggcataatcaagatcaccgcgcatatcaatgaacaggcggagatgccggacgatttcaaagccgagcttcttgccgcagcggaaacgaacgcaagcgcaaagctccatcccgtcttaaaaagacccgatgaaaagagagtgactgaacaggcttatgagaatccaagatttgtagaagacgtcctccgcttaacagctgccgacttatacgaaatggactggatctccgcctttgagatcgaatgccggaacgaagaatcgattcacttgcacgatgccgtggcgcggctgtcgttttccaaatgttaaaaagctcggccgaaaaaatggccgagctttacaattttaatgatgagcgtggtcaagcagacgatgctgaacatcataaagaatgccagcgagcctcttctgttttctttgcggcagcccattgcttttataaacaagagaacacataatgcggccatcagcagacagttacgattgttcaagctcttcgatcaacagcgacagctctgtccagcgctccattgccgcttcgagctcttcggctgtttgcgcctgctcttccatcaatgtctggattttggcaaaatcgctgccggcggcggcgatttcctcttcaagccgtttatgcttttcttccagagcggcgattctgtcttcgatgccgtcccattccagctgatctttataagacagtttcttccttttctttttctcaggtttgacaggttctgcggcttcagacgccggcttttgacggctgttctccttttgcttctccatatattcgctgtaggaaccttgaaaacgcgatacgtttccgccgccttcaaatacaagcagcctgtcgactacgcggtcaaggaaatagcggtcatgggatacggtcacgacaacgccgggaaactgctccaaataatcttcgagcacgccgagcgtctcggtatcaaggtcgtttgtcggctcatcgaggaacaggacgttcggctcctccatcagcactttcaagagataaaggcgcctcttttccccgcctgacagcttgcggatcaagttgcgctgcacgctccgcggaaagaggaacctttccagcatctgctccgctgtgaccacttgtccgtcggccgttttgacgacctcagccgtctccttgatgtattcgacgacctgcagcgcatcgttcatttcgctgtgatcctgtgtataatagccgattcttacggtctggccgatcgtgatctgtcctccgtcaggcttaatgcgcccggcaagcgcgtttaagagtgttgttttgccgatcccgttcggtccgatgatgccgatccggtcccccggcacaatcagttcattgaatgaacggacaagctgattcccgccgcggctgatgtcaacgccttccgcttcaatcacctgcttgccgagacggtgggagccgatcgcgaaatcaagggaagaaccggtttcaggcgcgtcctgctcctttagttcctccacccgctgaattcttgctttttgctttgtcgaacgggctttggccccccttctcagccaagcaagctcccttctgagaaggttttgccgcttcgtttcgttttgttcggcgagcgcttctctttcggcccgcttttccaaaaacacttcgtagttccctttgtatgtgtataggcgccctcgatccagttcatagatcctgttggtcacccggtttaaaaaatagcggtcatgggtgacgaggacgacggagcccggatacccgctcaaatagccttcaagccattcgatcgtttcattgtcaaggtggtttgtcggctcatccaaaatgaggaggtcagcgggctgaattaatgttttcgcaatcgcaacacgctttttttgccccccggaaagggagctcacttcttttgccacatccgcgacgccaagcttcgtcaatatcgtttttgccgccgtattcgcgtcccaggcgccatgttcgtccattttcccctgcgccgccagcaggttttcctgcttcttcggatcatcaggcgccgcattcagctcctgaagcgcctgctcatacgtcctcatcgtccgcatcatcacggaatctcccgaataaatgtgctcaagcacggtttccggaccgtccaaatcaggatcctgatccaagtactcgatatggaggctgccgggctttgtgatgtctcctttttcggtcgattcatggccggcgatcactttcagcaagctgctttttcccgttccgttcggtccgatcaagccgatccgttcgttttcttcaatatggaacgatatatggtcaaataatgttttgtctccgtaagttttatataaaccttccgctttaaaaatgctcatctgtctaccaatcctaacgtaatgtcataactttattttaatgcagatgatgcaagaaaactagtgagagctttttcgcggacattattgaaagacggccggaagccaaaaatatgcgctgatcacaatcaagaagacacctgcgatattgagccaaaagcccgccctgaccatatcctttatcgtcagcagattggagctgaagacggccgcattcggcggggtggagatcggaagcatgaaggcgcacgatgaagcaagcgcagctgccgccatcagcccgtacggctcgacctgaagcgcggcgccaaggccgatcgtcatcggaatcaccatattggcgacagccgtattagacatgatttcagtcataaataaaatcgcagccgtcaaaataatcaggacaaataagtaagggtggccttccaacagcttgagcttgccgccgatccatgctgtcagattggtcgccgaaaaaccggccgcaagcgacaagccgcctccaaacaatagaagcagtccccatggcagcgactgcatatccttccattccaaaatccgttcatcctttgtactcggaattaaaaacagcagaaccgctccgaaaatcgcgatcgacgtatctgatatttgaaacggaaggataaatttgaacatccacaaacatgcggttaataaaaaaacggtaaaaaccgatttttcctccctcgtcattgcgccaagcgcctttaaatcatgatcgataaaatcaggcttttttccttgaaaagcgctcactttaaattttattttcgttaaataaacatataaaatggcaagaaacagaatggaaaccgggaacccgaataaaaaccattcaaaaaacataatttcgtgattgagcatctgcttggacatcgcggcaaacaccgcgttcggaacggaaccgaccaatgtggcaagtccgccgatcgacgccgcatacgcgacagccagcaaaatgcttttgctgaacttctgcagcgattcgccttttaaaatttctttttcctgcacttctttaatgactgctagcgctacgggaagcatcatcaaagcggtggcagcattcgaaatccacatcgataaaaacgcagtcgccgccatcacgccaagcacgatccggtggctttcagccccgatccgctttaaaatgtgcaaagccatccgtttatgaagattccatttttcgatggcgatcgcaatgataaatccccccatatacataaacacaatcggatcgccgtatgctttggccgtcgtttccatatctaaaccacccaatgtcggcagcaaaatgactggcaagagcgatgccgccggaatcggcacggcttccgtaatccaccagacggccgtccaggctgtaaccgcaagaacgattcgcggcgcgtaagccagctcagcttccggtatcaagccgagaatcagcaaaaaactgatcggccccaataacaatccggtcagtttagtcgttgtatatactctcatctatcccatcccccttgaaagcggtttcccattcatcacttttcgctttgaccggggaaaattcctctaaaaaatttaaaataaaattttaataaatgaaaaattagaaaagcccgccgattttgccagcgggcctgtgaaagttctagtcttcaaattggtgttccgccatcttggcaaggttttgcgcgttgctgctgatctcctgcatcgtggcggaaatttgttcaacacctgcggcctggccgctcgtatgttcattgatgacttcgatcgaatgctcaaggtcttttaataacgcgtggattttcttcgtgatttggtcaatctggccgacgttttcttttgagtgtgtcgcaagcttgcggatttcgtcggcgacgacggagaacccttttcctgactctccggctctcgccgcttcaatcgccgcgttcagcccgagcaggttgctttgatctgaaatgccttttacggtgactgaaattttctcgatttctccggcgctttcactgacttccttcgcctgcttggagatgtcggacatttgtccggagaagccgctgacagattcggcgatatcctgaatggccgaagccgtctgctcgacgatgaccgacaggctttccgcgacgcggtgaagctgatccgatttttcaaggctcgtgccgagcccgactccgccgataacccttccgttctcgtcgtggagcgggatcgctctcgccgcaagagggaagccgaacagctccttaggcaccatgcttactttctttttgttttggcggatggcgtctgtaataatatcgccttcctgcaaagggtcacccgctttgacattcagggaaaatgtctttcccgggatgttgacgatcagcttttcggtatcgtaaatccccactgtcacatcgtcctgaatcagctgattcaggaacggcgccactttcacaaaagcatccagcagcgggtggatgtccgtttttactgcttcattcatgtatcaaatcctcctcttaatatggaaaactccttttttggtgctggacggaaatccattttaatgtcgtaaattcgtcaaggctccactctccgttcagccttccgatccccgattgcttttcaccgccgaaagcgacatgcggctcatcgttgatcgtcgtgtcattgacatggatcatgcccgtctcgatttgctttgcgatggcaacgccgctctccacatttcccgtgtgtacggctccgctcagtccgaaaggcgtgtcattcgcgatctcaaccgcgtctgcttcggtctcaaacggcatgacgcatacaaccggaccgaacagctcttccttggcgacagacatatcaggcgtgacatccgcaagaatcgtcggctcgacgagattgcctttaatatcgcctttcagaagcggtgtggcgccttcttcgatgcctttttcaatcgattttcttaaatgttcagcttggcgttcattaataacagggccgataacggtttcagggtccagcggatcgcccgttttaagcccggatactttttggctgaacagctttaaaaattccggatacacttctttttgaacaagaatccggttggccgacatgcagatttgcccttgatgtgtgaagcggctgaaagtcgcggcattgacggcgtattccaaatcggcatcctcgagaacgatcaaggcgctgtttcctccgagttcaagcagcggttttttgaaatgtttgatcgccagctgcccgatatagctgccgaccttcgttgaaccggtaaacgagatgattcgcggaatcggatgctcaacgaagctgtcgccgatttccccgatatctgtgaccacgacattcagcagtcccttcggaagaccggcttcttcaaaaatctttgcaatcagcgtgccgccgcaaatcggtgtttcctcatgcggctttaaaacaacgccgttcccggcgccaagcgcgggcgcaactgattttacagataaaaagaacggaaaattgaacggactgatgacgccgaccactcccgccggaatgcggtatatccgattttctttcccatcaaccggtgaagggagaattttgccttccattttgagcgggaagcccgccgcttctttgatcatattgacgacaagatcgatttcaaaagccgctttcagccgtgttccgccaagctcctccataatgagaaacacaatcgcttctctattgtcttcaatataagccgcggctttttctaaaattacccttttttcatagggattgacgccatcccatttctttttcgcctcaagcgcagctttgtaagccgcatcgacatcctcccgcgtcgctttccgaaaagaggcaatcgttttatgggtaaaaggattcagatcggccaacacgctttcactttggccgtctctccattcccctcctatgtattgacggttgaggtcagttatttgaatcattcagtccatctcctatcaaacagttttgggaaaagttagactacatcttatgtatcggcaatctttcaagaaaattcaatcttatgggtcttttggatataaaaaaagattttaccgataaatcggtaaaatccggatacaaggggaacagcaccgctcagtttttctgagcaagataaacggttgtgatcagcattgataaatattgcaggatatataaacctgttattaggaaaaatgaaaaggatattccttggaaaatgatcaccaacgcccaggcaattaaaatggccgccattgtaatgttccaggagagcgccttagcctgatagctaatcttctgctggcgctcatcgaacagcctctctttttttccaattcgtctgtttactttgtaaacaattgcgatcccgagcacgcctattcctaagcccgctaaagcgatcagtatgtttgtcatcgtttcagtcaatattttcatccccctcaaaaataaataaatcttcaatcagacattcaaaaatttgagccagtttatgcgccagaacgagtgaaggtttatattttcccttttcaagggaaatcaccgtttgcctcgacacattaagccttttagccagttcttcttgtgtcatgttcagcgaagtgcgcttttcctttattaacgttttcatctttcctccattgggaatgtaaagttcactatacgtaaagtatacttaacaaaaaaataaaatgtcaagttaactttacaataaaaaaagatagacaaaacaggtcgtcctcctgttcatctatcttttctttaccgattttttcagggcctctttttacgcccctaaatcgacattatggtaaacttgctgaacgtcttccagatcttccagcgcgtcaatcagcttttcaaactgtgcgcgcgcgtcctctggaagggcgacgtcattttgcgcgagcatcgtcagctcggccaccgtgaactcagtgatgccggcgttttgcagcgcctcctgtacggcgtggaactgatcgggctcggcatagacgatcactgcatcgtcttcctctaaaatatcacggacatcgatatccgcttccatcaataattcgagcgtttcatcagccgttttgccttcaaagccgatgacggccgtcggatcaaacatgtaagcgacagatccgctcacacccatgtttccgccgtttttgccaaatgtggagcgcacatcggcagccgtgcggttgacgttgtttgtcaacgcgtcaacgatcaccatcgctccgttcggaccgaagccttcatagcgcagctcgtcgtaattttcctcagagccgcccttcgctttttcgatcgcccgctcaataatcgctttcgggacattgtatgttttggcgcgctcaagcacgaatttcaggttctggttcagttcgggatcgggctctccctgctttgccgccacatagatttcgcggccgaacttcgcgtagattcggctcgtattcgcatccttggacgctttcttctcttttatattgttccatttacggcccatgatgtaaccactctctttcaacattgaatctttcattcacaaaatctattataccgcagggccgggcgatttcatcaaattgatgcatcgaatttacgacatttttttggaaatccttctaagacgcgagttttccgctgcctttcttctgctccttcttcacaaccgtgacaaagattccggcaatcacaaacacgattccggccaaatgaacgaatagagtaaaaagcaagcaccgtaacaatcatcgcataatagtcgcagccgcactatcgagaaaataattggtaacagtttgggatgacatcgcttttcctcctgatgtatggataaataaccggctttaagaaaaaaaaggatgtcaccatataatatgagacacccttcttaggcacaatctttgatcaatctctaaatcgcttccgctaaaatcataaaccggtactgtgtgacgtcaaaatagcccttttcttcaatcattttatgaatctcgtacaattcatccttgtattgattcacttcaaaaccgggcgcctgccagggaatggctttcaaataatagaccagagccccaatatcataaaacctttgagtcggacactcttctctgctttttaaaatcttaaaatcatgcttttccatctcttttaacgctgtttccaagtcccaatccttaaattcttcatttagcggcacgccaagtttttcatttatttcttcgcaatcaagcccgccgacttgctgagtgagaaaccgtcctccttttgaaaggattctcctcacctcttgtgctgaatatgattcgtgtttattgatgatcaggtcgaattggccggattcagatggaagctcttcatcatcatcaatttgaacgacctgaacccctaaaggcgtcaatcgttcctttgcgactggcacatttggcatataacattcagtagcgtatgctgacggaggaaacggccccaatttcgataaaaactcgccgccgcctgtccccatatcgagcatggatttggaatcttgtataagagacagagccatgcttccgtatgaccatgaaagcaggtcgcttttcattcgtcctgtgtcttcaatgaaagaaaaatcccagccgctgaaaggcttgtctgcgtgctttaaatatgaaagaaatgttttgtcattcataatattcccctccaatttttaatgtttaaatatgttttaaacgattggagggcctctcgcgaatctggaaggtttttatatttcatgctctggcagattcattgtaattccacaccccgtttcatgatttaaaaaagaagccctgtaaaaggacttcagcgaacattaacccccaaccggcagctccgctgtttgaacgccgcctgacgcctgattgtggctttgggataaagcagctccgcctaagaccatagcagttaacgacaagcaaagaattaattttttcatgacaatacctcactccctaatgatctcattttgttttcggctttcatgaatattttaacaaattccagcgctttcttgtcatctccttttttctcaaaatagcttgagatgagcaaagaaagatcgcagacaccgtctaaatcattcatctcgtccaaggaatggatgtcgtctttgatgctttttacgttttcatggcaatacagctcataaataatatttattttcttttcataatgcttattcccgtttttctttaattcctcctgtccttttttatgatagaacagggccgcttctgtttcgccgattttgaaaaactctctggtcagcatgtaaagcgagttgatatagtagcttgacttgcaccattcggcgttgctcaaagcatgctggacggcgagaatgcattcctgagaccggccggaattggaatacagaatgctgatattgtgatgaagcatcgcttctaaaaatgaatcgtcaatctttttggaaatttcaatcgattcttcaaagtacttctccgcatctttaaagcgctgcatctgcatgtaatttgtccccatcacaacttgggaaatcgccagctttttttcgtacccgtcatgcattttgtaaatattcatcgcgtctctcgcataattgagagaaaccgcattttgccgaagagacatatacagccaggacactttaaaataaaactcggccgcttcaatctgatcgggcaccttcgccagttttttctcggcaaccttgtacagactgatcgcccgctcaacattcttgttgtacgcttcatgcatcgcctcaaaaaagtagaaatagtaatcgatcatatgatccgtctgctcgatgcactcgatttgcgaatcattaaagtaagactcccgcggcagccgctctcccctcgcatcataaagcatcatccggtaccgctcctcaagaagcgaaaaataagccagcacattctgatcctcttccatctcggaaaacatcgacttcgcctcatcaaaaagatgctttgcctgctcagtatcgtgctttttaatggccaaatggaattcgttcaacacccccgcaaccacctctgaagcgaccttgctcatgccgaaccccctctttctttttaagattgttctctatctttaacatgatcttatcacacgtgtaaatttttgtaatgaccttttgtcaattagtaatctgtttttgtcaacaattgaaaaagccttttgttgtcaatttcaactgttggtagtgatcaacaactcatcttgcctataaacaaaaaacgctccttctttttcaaaaacaagaaaccactcgccttccacaaaggcaagtggctctcatttattttaattgctgataagaaatcaatcgatgaatatggactgccaagtatgtcagttcatcattcggaatgacgtttccgtgtacctgcttgatataatccttaattttgaaagctacatccattgcttgcggatataaattagcaatttgctcaaataattcattctcctgatttgccagcaatttatcagcgtaaaatctttcaacgaaaaatttaacgtgtgtgataaatctgctgtagtggatgttttcttgatctaatttcatgtttaatgtgtaacggacaaggttgacaatgctcccgatcatttttgcatttttcattccatcttttgactctgtctcttcacctaatgcattgattaagtggaacgcaatatttgccgcttcctctttcggcaattggatcccaaatgtttcattgatgagctgaagcgcataattccctgcctcaaactcttccgtatagtagtttttaatttcccagtagacgcgattcgtaatattgatgttctttttatagcgctctactgcaaaattcaagtgatccattaatgtgaagtatacaccggaatttagctttgtttttaatctttcttctgcatgctgaacaatttgctgggtcaattcaataaattcttgcggaattgaatccaacagttggagaaattcctttgccttcatattgtctactggcataaacacttgatcagcctgtttttcttcaatcatattcccaggttttcgtccgtaaccgatgcccctgccgcataaaaccatctcctgtcggttctggtctacagccagtaccacactcgagtttaaaactttttttattttaaacatcgccatcaccttttcatgaatgcggttttttagtctaatacttctccgtttgtctcaatcactttcttataccagtagaatgaatctttacgtgagcgcttcaatgtcccgttgccatcgtcatcttgatcaacatggataaatccatatcgtttggacatttgagatgttcccgcactaataatgtcaatgggtccccagctggtatatccaaagagatcaacaccttcttcaatggcttctttcatctgacggaaatgctctctgaaatagctaatacgatagtcatcatggatcgatccatcgctttcgacaacatctttcgcacccataccgttctccacaataatgagaggtttttgatagcgatcatacaattcaatgagcgaaatctttaagccgaccggatcgatttgccagccccaatctgttgacggcaaatatggatttttcacaccgcgaatcgtattgccatctgttttttccagaccctcctgtgcagattctgtcagggacatatagtagctaaacgaaacaaagtctaccgtatgttcttttataatggcaagatcgtccgcttccatcttaatattgatattttttcgttccagcatgcgtttgatcaatggcggatattcgccaaacacttgaacatctgcatagaaatagttatcaaggttttgcttcagtgcgcgttcaacatcactcggatgacaagtgtgcgggtatgtcgtgagtttcgttagcatacatcccacctgactgccgggaatgatgcgatgacaatctgcagtcacaagagcggatgccacaaattgatggtgcaatgcttgataaaccgtttcctctattttcccttcaggacagcgatcaggaatgattcccgctgtaatgaaagaatggcgatgtatactgtcaatttcattaaaggtaagccagtattttacgacatctttatagcgttcaaaacacacatttgcgaacttcacaaagagatcgatcacttttctttcaacccatccgttgtatttcacactaagtgctaatggcatttcataatgtgacagagtcacgatcggttcaatgttatgttttttcatttcttgaaacagacgatcataaaactgaaggcctttctcgttcggctcagcttcttctcctgtcgggaaaattcggctccatgcaatcgatatacgcaatgttttaaaacccatttctgcaaagagagccaaatcttctttatagtgatgataaaagtcaatccctctgcgcttcggatatttttttacgtccgggtctttcattgcacgatcaatgttttcagaagaaacagcaaggtgtccttcataatcttccacactcaaattcgaacggtacatggcaatatcagcaacagacggtccttttccatcaacattccaggctccttctgcttggtttgcggcaatcgccccgccccataaaaagtctttcggaaatccttttgtttttgtcatcatgattaccctcctaattgtgtaacaaccatcaacgtatcttgacgattgacctcttttaattgcgtgacttttatatcatattgatccgtattcgtaataactgctagtgtaactggatcataacctgcttctttaattttctccagttcaaattgaatgagcagatcacccgctttgacttgatcccccacttttaccaatggtttaaagaacttgccctctagctgaacggtgtcgattccaatgtggaaaagaacctcaactccgtttgctgttttcataccgagtgcatggtttgtttcaaagagaagagaaatctcgccatctatcggtgcatatagttcaccctttgaaggaataatggcaattccttctcccattacctttgaagagaatatgtcatcttctacatcagacagtgaaatcatttgaccgatgactggacttttgaacgtctcatctgcgccaagtttttcagcgaaaacacctggctctgcttctttttctgtttcttctgtctttcgatcctttcctaaaataaaggcagcaacaaacgcaacaacaaatgagatggcaaaaccaatcactgcgaacatgaagttgcgcggaagctcgtcagatatgaacatcgacatacttgcaagaccaggtccaacaagaacaaacgcttgaagtccgacaagtccaacgaagatgcctccggtgaaagaaccgatcatgacactgccaagcacacgtttattttgcagtgtcaccccgtataatgccggttcggtaatgccaaaaaatgctgaaatccctgcagaaatggcagttgaacgaagcactttatcttttgtgcgaagggcaactgcgaaacacgccccactttcagcgatattatgtgcaagtgatgcaggcaagtaaagtgcctcttttccgagattgcccattgtcgttacagcgtatggcaccatcgctttgtgcatccctgatgcgaccataaatggaaggactgctgccaggaacgcaaccgcaacccagcccactttgtcaaacatagcaaggatgatcgctgtgaagccttgccctgctgtaaaaccgattggtcccagcagcaggagagtgatcggaactgtaataaccaaagacatcatcggtacgaagaagatacgaatgggttttggcgaaatacgagtaaaccatttttccacctgtgcatacaacaggacagataaaatcgccggaaacacctgataggcatacgcaatatttttcacatcgaatgaaaataattgagcgccttctgtcagcatcgccgtcatgtttggcagaataagagcgccgactgccgataatgcaacaagcggattcactttcagtttattggctgtcgtcacggcgactagcaatggcaggaagtaaagcggcgcatcgccaaccatatttaaaatctgatacgtttgccctttggcatcaattaatccgaataacgagaagaggaggagaaacgattttaaaatccctccacccgcaatggctggaacaagcggttgaaaaacaccgacaatgaagtctaatagtacagtccctacttttcgcttttccttcggctgatgggaagacccattttgtccagaaagtgctccgccgagaaggccggtcaattcctcatagacttcgatgacatcgtttccaatcacgacctggcattggcccgacatacggacagcgatgacacctggtgttttctcaagcgcaggtacatccgccttgttttgatcaatcaatgtaaaacggagtcgtgtcgaacaatgctccaaatgggcaatattctctttatcgccgacatgctgcaatacgtctcttgctgtttgtgtgtaattcactgtttctcccccttttctgaaacatgagacctatatttaggcaataaaaaaaggacccaaaccgacaaattaaaaaatttatcggttttagatcctgcctgcatgaccagtcacatgtctaatttatcaatattggatttgattaaagtatatatcggttttatgaaagcgtcaacatttattttatttttttcggaaagaagcgaatttcctggtcaattgccctacaatttattcctaatagctcagaagtggttgcggggggtgttgaacgaactccttttggcaattaaaaagcataaatattgaacaggcgaagtcaatatttttcgatatggaagataattggaatctacttctcgttgcttgaggaacggtatcacatgtgtaaatttttgtaatgacattttgtaaattggttaaacatcaaaaagccttggtagcgcttggacttttatattatatccaatctcggatattaagtcaagaactttttttgaagttctttttttctttcgccgccgttttgcggcaacgaataataatataccaccgtatttatgattgtgcaatacttttttgagaaaaaatttaatttgttttaaatgagcagcagccgcttgttacgcggctgctgcacgaaagtcaactaacgatgtctcatttgcgggaatagtaaaacgtccctgattgaaggagaattcgtcaaaagcataatcagtctgtcgatgccgattccaaggccgccggtaggaggcattccgtactccagcgcttcgacaaagtcttcatccatcatatgcgcttcatcgtttccttcttcacgttcttttaattgcgcttcaaagcgttctttttggtcgataggatcatttaattcagtaaatgcattcgcgtgctcacggcccacgataaacagctcaaaacggtccgtaaatcgagggtcttcaggatttttcttagccagaggagaaatctccacagggtgtccgtatataaaagtaggctgaatcaacgtttcttcaactttttgctcgaagaattcattaatgatatgtccaactgacatgccttcagaaatttcaattccgtgttctttggcatatgctcttgcttcttctaccgatacttctttccagaagtctacaccggtggcttctttaacagcatcgaccatatggagtctcttccattcaggcttgaggtcgacttcataatctccatattgaacggtcgtagtgccgagcacttcttgtgcaatatgagcaatgagattttccgtcaatctcataatatccttatagtcagcataagcttcgtaaagttcgatcatcgtaaattcaggattgtgccgtgtggagaccccttcatttcggaatacacgtccgatttcatagactttttccaacccgccgacgatcagccttttcaaatggagctcgatagcgatcctcatgtaaagcggcatatccagcgcattatgatgtgtaatgaacggacgggcagatgcgccacccggaatcgcgtgcatcgtaggcgtttcaacttctaagtatccgtggtcatctaagtatcttctcatggattgaatgattttgcttcgtgtaataaacgtatttttgctttccggatttacgatcaaatccaaataacgctgacggtagcgctgctcgatgtcctttaatccatgatatttgtccggaagcggacgaagggcttttgtcaataaatcaaaagatgttgcttttacagacaattcgcctacattcgttttaaacatgacgcctgtaacgccgacgatgtccccgaggtcagagcttttaaaccattcgtactgctcttcaccgacactgtcttttctgacatagatctgaatctggccctttaaatcctgaatatgcgcgaatcccgctttcccttttccgcgctttgtcatcatccggccggcaatcgttacttcaattgctttttcctctaattcttcttttgagaattcattatacgactcaatgagatcagttgattgatgggtgcgatcaaaacgctgtccgaaaggatcttttccgctttctctcaactgattcattttatcgcgtctgacttgcagctggtcgtttaattcttcatggttatgctcttcatggctcatcatatatcactccgttacttttagtctttcaggaaaaaagcagaaaaactgccagtgaaaactggcagtgagcagaggtcggatttatcctacttttgcatcctgaagctcttttgcctcggcttcaatcgtaaacgcgtctaaaagctgaacgagctcatctctcgtttcgcaatggttgatttcattccggacctttgcgtttcctcttatgccttttagataccaggctgcgtgctttctcatttcgcgaaccgcaacattttcgcctttcagcccgattaatcggtcaaggtgaagtttgcagacagaaattttctcacgcactttcggctcatctttcaattcgcctgtttccaaatagtgaaccgtacggtaaatcatccacgggttacccagcgctgcacggccgatcatgacgccgtccacccctgtttcatcaagcatgcgttttgcatcttgcggagttttgacatcaccgtttccgattacagggattgaaacggactgcttcacttctttgataatatcccagttcgccgttccttcgtacatttgcacgcgggtccgtccgtgaagagcgaccgcttttccgcctgctcgttctacagctctcgcattctcaacagcaaagatatggtcttcgtcccaacccattctcattttcacggtcacaggcttgtcaacagcctccacgacagctgaaaccatttcataaattttattcggatcaagcagccatttggctcctgcatcacattttgtgatctttggcactggacatcccatgtttatatcaataatatccgcagttgtgttttggtcaacaaacttcgccgcttcgacaagcgtttctttttctccgccgaagatctgcaggctgagcggtttttcacgttcatcgatataaagcattcccatcgttttcgcattattgtaaaggatcgccttatcgctgaccatttcggcgcagaccaaacccgctccgaattccttaaccgtcaagcggaaggctgagttgcagacaccggccatcggcgcgagcacaaccctgttttttaattctatatcaccgattttaaacatttttagtcctcctttcttattcttctgatggagatagttcctccactgttatatttaaagtattggctacatccctgagcatgctctccgtcggcatacgattcccgcgttctacttcaccaagcacagaaacggatatacccaatgctttggcaaacccttcttgagtataacccttcagctttcgatatgcacgaattcgtctaccccagatttctgcttccatactcttacaccttcttgattttttgcatgattgacagctccctcaagatccggataaatctccagcagcgggatgagtacaaacaaacgttcatgcattctaggatgaggaacgataagttgctctgtctcaatattttcacgattatacaacaaaatgtcaaggtctgcagtcctcggcccccatctaatgtcgcgtttgcggccgagttctttttcaatacgctgagtcaaatcgagcaattcaaacggtgaaagagatgttttaacagctgcagccatgtttaaaaatagatcttggtctgtataaccgacaggatcagtttcgtaaattgacgagatgtctgtcacctctacagacggatgttgatggaggagagagacagctttttttaaatattcttcccgccggccgatattcgagccgagcgctatatatgccgtgttgttcattttcgctttctcgtcatctcgatggccaccgatttatagtgaccaggtataggaggatcaggcttgacgactttaaccgtacattcctgaaccgcttcaaaattctccagcacttgtgcggcaatcgtttccgcgagggtctccacaaggttgaccggctctccctccacaacctctttgcacagcttatacagctctgcataattaatggtggcctcaatattatccgttttcccggcttcgcttaaatctagaaatgctgtcagatcaacgcggaatctctggccgagtttgttttcttctttgaaaacaccgtgatatccgtaaaactccatgccctctacatgcactttatcgatgataaacgcctcctttatcaatcatggcatccatcatttttgccatcctggagatttgcttgacgtcatgcaccctgacgatatcgcaccccttttgaataccgaggcatactgtcgcccccgtgccttccgctctttcttcaggcggcagatccaggactcggccgataaatttttttcgtgacgtccccaataaaaccgggtatcccggttcgctgaacttctcgagctgattcatgaccgccaaattgtcatgatacgttttggcaaagccgatgccgggatcaagtacgatgtgatgatcctgaacgcctgctgattttgcaatgctcacacattccatcaaatcagacagcatgtccgggatcaaatccttataattccgttcctcgcggttatgcatcaagataatcggcacattatgagcggccgcaactcgggccatgtcaggatctgcttttgctccccagacatcattgatgatggctgcaccggccttaatggcttcatctgccacttgcgctttataagtgtcaacggaaatcgggacgtcgatttcctgaacaagtttttcaattacaggtatgactcttgacagctcttcatcaagagaaaccttttccgcccccggcctcgtcgattctcctccgatatcaaggatatgggcgccgtcttcgatcatttgttttgcatgaatgacggcgcgatcgatgctgttatattttccgccgtctgaaaaagaatcgggcgtcacatttaaaattcccatgatcaatgttttatcttcataagacaacgtgtattgctttgcgatcagttgctttgaacgcaccgctgtttgaagcgccatatccttcaccctttaactcaaatattcttttgctgctttcctatcattagtgtatgcctcttgcagacgtttcgacaaatttccatcctttcccggaaattcagtgctgccgattctccggaatggaacgatttcctgaacggaattggtcatccatgcttcgtccgcaaagagaagctcttccaaggggtataccccctctatgacttcgattcccatatctgcaaggcgctcgatgacgtagcggcgtgtgacaccgcctaatatgccggtatcaagagaaggtgtatacacacagctgcctttccgccaaaaaacgttggaaataattccttcagctacagctccgccttcggtaagaaaaatcccttctttggccgcgccatgtccgagctccctttttccgtacaaattatttaaaaagtgatgcgatttcaagcggaacggaccctctggcgtattgcggcggacctgcaagatgacgccctccttttcagccggaacggatgcaggctgaaaaggattcatcatcaccatgacgccgggatttttgtatgaatcaggaaaaaggccggggccgccgggaccggcggatatatttagccggaccctcgcatccagattctgcggctgattcaactgaagcagcctgtcaagaatgacaagcacttcgctttttgtcagctcaagctcaattttcagctgttccaaagcgttgttcaatctgtccatatgccagtctaaaaggaagggcttcccttcataaagccggaacgtttcgaataccccgactccgtataaaaaaccatggtcaaaaggagaaagtcttgcttcctcctcctttacatattgaccgttcaggtaaatgatcatgcgttcactttctttcggtaagtctcaataaaattcttcagcatctcttttccgtaagcggtcataatcgactctggatggaactgaacgccttcaaccggcagttctttatgcctgatggccataatctccccttcttccgtccaagccgatgtctcaaaacaatcgggcagtgtatccggtttgacgatcaaagaatgatacctcgtggccgtgagcggatgttccaggcctttaaaaaccgtcagcccgtcgtgcgaaatctcggaagttttcccatgcattagccgctctgccctgacgacatcgccgccgaaaacctgggcgatcgactggtgtccgaggcaaaccccgaaaatcggtattttcccggcaaaatggcggatcgcttcaaggctgatcccggcctcatccggactgcaaggcccgggagaaatcatcaaaaagtcaggcgacatgtcctctatttcctgaagggtgatctcatcgttccgcttgacgaccaactcctcgccaagctcgcctaaatactgaaccaagttgtacgtaaacgaatcgtaattgtcgatcattagaatcatatctcagctctcctctgctcttttttctcttcttcactcaactgcagcgcctttttcatcgccagggcctttttaattgactctttatattcatgcctaggatttgaatcgatgacgattcccgctcccgactgcatgaacgcctggcccgctttcacataaatcgttcggatgacgatattaaagtgcatatcctgattatatccgaaccaccctatagaaccagtataaagcccccgtctcgttggctcaagctcctcaataatttccatcgttctgactttcggcgctccggtgatcgtacctccgggaaacacggcatggatgacatcaacggcatcgcattcatcccttagttcaccgcacacatttgagacaatatgcatgacgtgggaatacttctcaatcaccatgaattcatcgacccggaccgaaccgtacttggagaccctgccgaggtcattacgctctaaatcaacgagcatcacatgttcggcgcgctctttttcattcatgatcaattcgttcgcgagcgcttcatcctccgcttcatccgccccgcgggatcgcgttccggcaatcggccttgtttcaagcctggtgccctttttcttaatgagcagttcaggcgacccgcagatgatttgaaaatccggggtttccaagtaggccatgtacggcgaagggttgatttctcttaacatcttatacacctcataaggaggcgcagaaaggcgctccgactggcgaacagaaagattcacctgaaatacgtcaccgcttgcgatgtattgcttcactttctcaacagcctgagaaaagccggcttctgtaaatgaggccgcgaatgccgggcctttgttatcattcggctgatgacctccagcggccttcggatgttccgtcttccacatttgctcaagcctgtccaatttctcttccgcagcggccggcgtttcttcatcagtgtgggtaatcacccaaagctgctgctgctcatggtcatagacggctatatcatcaaatacgagaaagaataaatccggcgtttgcagatcatcaatagacaggattttgaatttctcaatataccgggcatagtcatagctaagaaaaccgacagccccgccctgaaagtcgggaaaatctgcaactgtctccgttttcagcgtttcaaaccattgagaaaactgcagaaacggatccccctctttgaatatgacgtcccctttatattgaatcgtcgtgataccgtctttccctttcgctattgcgacagggtcgagtccggctatgctgtattctccgcctctcgcgctttccagcagaacgtggtattcttttcctttcgataggctttcatattgctgcaaaaactgttgattggaaaatgggaacgctctggctacaggccttcgttgtctcatcatatcattcctctgccgttagtctaatgtccttattgtaatgcatatcttttttctaggaaaagagaatttcatttccaatacagaaaaaagcccttgagcatgttcactcaaggacaccgagcttttaaaagggctgcgctccatgacaaacaaaaggccgccgacatcgtcggcagcctcctgtttcagctggagcctattcaaattggtaaagaggcgtgcttaagtatctctctccgttactaggaagcacagcgagaacttttttgccttttccaagctttttagcaacttgaagagcagcacagatggctgcgcctgaagaaattcctccgagaattccttcctctctcgccgctttacgggcaaattcaaaggcttcttcgtttttcactgtgatgatttcatcgtaaatttccgtattcaagattttcggaacgaatcccgctccgattccctgaattttgtgcggccctggttttcctccggaaagaacaggagaatcagtcggttccaccgcgaaaatcttgatggacggatttttttctttcagaacttctccggcacccgttatcgttccgccggttccgatacctgcaatgaaagcatctaaaccgtctccgaattgttcagcgatttcttttcccgtcgtgcggcggtgaacttctgcgttcgcagggttgttaaattgctgaggcataaaatagccgtgttcctcagccagttcttccgcttttttaatcgcgcctttcattccctcagcacctggagtcagcacaagctcagctccatatgcacgcagaaggttgcggcgctcagaactcattgtatcaggcataacaagaatcgctttgatgcctttcgctgcagcgaccatggcaagtccgattcctgtatttccgcttgtcggttcaatcagtgtatctccttctttcagaaggcctttctcttcagcgtcttctatcatagcaagcgcaatccggtcttttacgctgcttccagggttcatatactccagtttcacatatacttcagcactgtcttcatcaactagtcgatttaatttaacgacaggtgtatttccgattaagtcataaacagagtttgcaacgcgaaccatttgaacacctcaatttccgagtaattttattgggattatatctaatttatcaatatcaaaatattttgtcaatctttattttttatcgtcataaaaccaagacactttcgcatctttccagagcgtcttgacagaagctttatcgcctaattgatccatcgcgatctgccttctgatttgatttttcacttcgctgtaagtgaaagcttgccccgggagcttttctttgagctggataatcgcatagccctggcttgttttaatcggttcatccacccattgattttcctttagttgttcagctttctccaaatattcggccggaacgttttcatgctgatcattgacgaaaccgaggtcgccgccgtaaggagccgtataccggtcagtcgagtgttcggctgcggccgcttcaaaactggacccttccttcagttctttaagaacttgttctgcttcatctttatctttgacaacgatatgcttgaggcgataagaatcatcgaatttatataagtccttatttttgttatagaatgacttcaattcgctgtcagaaatgacaatgtcttttgtcaggagctcttcaagaagaatattatgcttgatctgctctttccattctttttctgttgtgttttcgtcttcgtagaaggaattgtatacagctttaatcagcagaaattctctttcaatgtcatcatcagacactttgatcttgtttttttcggccatttgggtaactacgcggtcgttgatcatatcttcaagggttgattttccgtagcgctcttccatttcgctcagccattcttcacgcgtgatgccgttttttccgatatgggcaatgacttcttgagctgacgatgaagaagcggtctgcgctttcgtcagaacatacgcgatcacaatgcaattgacgaagatcgcacctaaaataatcggccaaagtgttctcgatttcaatatggtgtctcccctttccccattgtaaaagacccgctactggatagcgggcttatatttcatctcgaagcgcttcaagctcttcctttgtaaacagatacgtttcattgcaaaaatggcattgagcctcggcttggccatcttcatcaatcatctgttgaatttcatccttgccaagaccgatgatgcctcttgcgaaacgttcttttgaacaattgcatgtaaatcggacaggaacggtttccagtacttccggttcttctcccaataccgcagccagcacttcctcaggtgtcaaacctttctgaatcagctttgaaattggctccacttgtgaaaggtttgtttcaagcttcgtgatggtttcgtcgtccgttcccggcagcagctgcaggataaatccgcctgcagctaaaatcgtattgtcggggttgacgagcacccctacacccaccgaagaaggaacctgttcagaggacacgagataataagtaaaatcctcgccgatttctccggaaacgatctcaacctggcctgtaaataaatcgcggagaccgagatcttttactacgcttagcgttcctgacgtaccgacggctcttctgacgtcaagtttgccgtgttcatttaagtcgaaatgaacgtgcggattggacacgtatcccctgacgtctccttttgcatttccgtcagcgacaatcgcgccgatcggtccgcctccttcaatcttaacggtgagcttgtcttcgcctttcagcatggcgccgagcatgacagccgccgtcatcgttcttcctaaagcggcggaagcggtaggccatgtgttatgccttctttgggcttcatgaatcgtttctgttgtattcgctgcatatgccctcactttgccgtcatatgcaatggctttcactaaataatccatacctcatcctcctatacactttcaacacgattccgttcataaatgagctctagccccttcaacgtaaggaacgggtcaacaatatcgatgcagtccgattcgtctgcaatcaaggaagcaaggccgcccgtcgctatgactttcggatttttcttagactgccatttcatccgtttgacaatgccttcaacctgtccgacatagccgtaaagaattccggactgcatcgcgctgaccgtacttttgccgactatatgatcaggccgtgcaatttcaattctgggaagcttggcagctcttgaataaagcgcttcagttgaaatcgtgatgcccggcgcgatcgcaccacccatatattccttgcgctcattaatgtaacagtacgtcgtagcggttccaaaatcaacgacaatcaaggggctgccatagagatgaatagcggctactgcgtttacaatgcggtctgctccgacttctttcggattatcgtattttatgtttaatcctgttttcattcccggaccgacaatctgaggctcgatctgaaaatatttgatacacattctttcgagggagaacatgatcggtggtacaactgatgaaataataatcccctcgatctggtcaaacatcagtccgacataatcaaataaagaacgaagaagcatgccgaattcgtcttccgttttatggcggcttgtctcaatccgccaatgatattcgagctctccttcgtggtagatgccaaggacggtgtttgtatttcctacatctataacaagcaacattctgatcaccacttttgactagtttctcttacttggacataaaacattctaccatcatacaatacacgatgccgattctgtttgtaaacgaatcaaaccggtgaggagaaagattttccaaagcggattttttcagccataaaaaaagaaaactgccaaaagcagagcttggcagttttcctgaagagacgaaaaagcgtcattactctttttcatcctcgtttttctcttcgtcatctcgtttattgatgttgactttcacatcatctgtcttctcctgatcatcagagtatgttcgatcaggaagtcttccgtgctcagacaaatgcttgatttgctcagcgtcgagcgtttcaacttccagcaatgtttgagcgatcagctcaagtttgtcgcgattttcagtaaggattgtttttgcacgttcataacattccttaatgaagcgctggatttctttatcgatttcatacgcaatcgcgtcgctgtagttttggtcattgttgaaatctcgacccaagaatacttgcccgccttgcgattgtccgaattgaagaggaccgagcttttcagacataccgaattcggttaccattcgtctggcaatgcctgtagcgcgctggaagtcattatgggcgcccgtgctgacctcgccgaagatgatttcctcagctacacggcctccaagcaagccgacaatcttatcgagaagttcgggtttggtttggaaataacggtcttccttaggaagcatgacggcatatccgcctgcttggccgcgcggtacaatcgttactttatgcaccatatccgcctcatccaagacaagtccgataacggtgtgtcccgcctcgtgataagccacgatattgcgttcttttttcgagatcaccctgcttttctttgcaggtccggcgatgacgcggtctgtcgcttcatcgatgtctcgcatatcgatctttttcttatcttgacgcgccgccacaagagccgcttcatttaaaaggttttcaaggtctgcacccgagaaccctggcgtccgcatcgcgatcgcttttaggtttacggattcatcaagaggcttgtttcttgcgtgtacttgaagtacagcttcacggcctttgacatccgggcggtcaacagtaatttgacggtcaaaacgtcccgggcgcagcaatgcagggtctaaaatatcggcgcggtttgtcgcagcgatgatgatgattccttcattggcgctgaatccgtccatttcaacaagaagctggttgagcgtctgttcacgttcatcgtgacctccgccaaggcctgctccccgctggcgtccgacagcatcaatctcatcgatgaaaatcagacacggcgcatttttcttggcgttttcaaacaagtcgcgaacacgtgatgcaccaaccccgacgaacatttcaacgaagtcagatccgctgatgctgaagaaaggcacccctgcttcaccggcacatgctttcgccagcaatgttttaccggtacccggaggtccgaccaaaagcacgcctttcggaattcttgcaccgagctcggcgaatttgcggggatccttgaggaaatcaacgacttccacaagctcttgcttttcttcatccgctcctgccacatctttgaatttgacgcgtttcttttcttctgtatagagcttcgccttgctttttccaaagttcataacacggctgccgccgccttgagcctgattaagcaggaagaagaaaagaatgaagataataacaaaagggatgatggtggtaaagaacgtcatccatccatttgcttcttgcgcaggttctatttgtatcttcgtttttttcacttgatcaatgatttgatctgccccttttccttcaggaacatgggtcaggaaatactgatctttctcataggtcgtcagctgcccccgaacctcgtacacacccctgacaggctggatggagacattttcaaccttcccgttttctaggtttgaaacaaagtcactatacgtcatattttctgttttcggatttgcggtttggaagtagctcacaactccgatcacaactaataaaataagtaaataaaaaatggtattacggaagacccgattcattccttacctcctcccacagtaagcacaactatgttcaatagtatcatagaaaatcgttccaatacaacagatatccctttcgctaacaagcccgtatcagctctcataaaccgcaggtttcagcactccgatgtacggaagattacgatagcgttcagcataatcgagaccgtatccgacaacgaaagcatcgggaacttcaaagccgacgtaatccgctttgatatccgcttttcgtccgcttggtttatcaagaagggttacgatcttaatcgattttgctttgcggtatcggaaaagctctacaagataactcaaggtcagcccactgtcgatgatatcctcaataattaagatgtcacggccctctacagatgtgtccaaatcctttatgattttcacctctccggaagaaaccgtggaactgccgtagcttgatacatccatgaaatccatttccagatatgtatcaatatgctttaaaagatcagccataaacggcatggctccttttaacacaccgattgccagcggaaacttgccgctgtactcttctgtcagagtcgcgcccagctccttgactttcttttggatctcttcttccgagatcaagatattttcaatatcctgtttcattctttgctagccccctacacttttcatgctgtctatattgtaatacaatgcgatcgttgtttgtaacatcaagttcctcaaaaatggtttttttcagaccaggtatccagataatgtttccaaccgcgtctgttacaatgggccagctgtctctttttgaaagaggcactttttcatcaataaatatatctttaaccttttttgagccgttcatccctttaagtttgactcggtctccgttttgccttgtccgtacgtaaaggggaaactgaacctgcttgggacttgttgcaaaaacatcatttccttgcagcttccgggttgaaccgggtccgctcacatgaagggaggagccgccgggaagtatcagttcttcttcgcctgccccgcttatttcataatgataggaaacattttcacattgtaaacgctgaaatgtaaacaaacatgtatgataagattttgcgacttttaacccattcggaaaatcaagggaaccggatggtccgtcttgtgaaatccaatccagaaacacttgaatatgatgggctgaaaacgctgatggaacgttttcataaagatagtttaatattagatgaactccccttctttgtaaaggcatagggagcgcaagaagtcgttcgatgctgatttccacgcctgaacttgacttgcttgtgattactgtattcattttgtctttcgttaatgcctgtaagtataattcgtcttctgtcaggaattcactgacggattgaaaccttttatggacatcttccgactctttcttcagaaaagggagaacatggtgcctgaaccggttcctggtgtaatcatcctcactgttgctcggatcggttctaaacggtattcgattctctttgcagtaagccaaaagatcatcctttgacagcctcagaaacggcctgagcagccagccgctgtcaaaacggcgctttggctgaattccggcaagcccgattccgacagtgccttttgccatcttcatcagcatcgtctccacctgatcatctccatgatgacccagaaccaggtattcggcccggtgccttttcattaactcttgaaaaaacgcataccggcattctctcgcagcagcctgtttattcagattgttttcagcggcaaatgccaggacatcgatttgcaccgcctcgcattgtatgccttccgcctcgcagtagtcctgaacgaaccgcatatcacgctcggactcttcgcctctgaacatatgatcgacgtgtgcggcaatcagcgttgcagaagcgggaaccgtatggtgcagagcatgcaaaagcgccatcgaatcaggtccgccggagacacctgcaatcagcgtcactccatcaaatgacagttcgtattttttcatgaaatcttcaatacttttcacaatgtcctcccactaagagcagggtgtatttcaaaagatataaatatcctaacactttcaatcggtccctgcaaagaagagctatccgccgagaatgcacagctaaataaaaaagagaacgatatacgcaaagtaaagggcaagaacgcttacgacgatcaacagcgtttcaaaaacaccgccggatttagaagggtttctttgctttctgcgcccgctccttaacctttgctgctgaggcgtcccccgcttatgccgcaggccttgcgacggggcagatgccgatgaggaacgggctgttctcgactggcggctgctttgcattcgtggcggccggccgatttccagaagatctcccttcatttcatcagctgttcgatagcttccttttaaagcagaagcaagaaccggtttataccgttttaaaaacggatgtccgtcaatgactgacatgagctgctcctgaggccttgctgtcttcttgaattcttttttcaccgcacagttcaccataatcatggcgactgaaaacaggtcatacgacggctcagccttacgagtgccgaattcccaatagcctctgtcaaaaaactccgtatattccttaattgcccggccctcttttgtcgtcccgcccacatcaatgcagcggatttgcggcggaggacccgtcacgattaaattctcgggctttaaatctccaaacacccatccttcgcgatgaatcgccgacaggcttgagagaagctggctgatcagcaccggagtccattcctcgcctttttcgtttacatatcttaaaagaagcggaccttcaatatattccatgacataaaatgaaagttttttgccggtgcctgtaaccatcatgtcatccacatcaaaaaaagaaggccccattgcttttgcctgggcctttgagaaagatttcagaacattcacttccgaggtaatggacaggctgtcatcgctcacttttaatgcaacccggccctttcttgaatcggccagataaacaaccccatttgccccttttccaagctgtctgatgatcttgtaggaatgattgttccactttccaacaacggctgcacccggctttagactagccgccaaactcgtcgaagcgtttttcatcgtcttctaacattctccttcttgagccgattttgttaaaatgctgaatcgcctctcgtattgcgggtcctgtcggtgtaatgccaccggctgaaagcttggaaaatattgaagaaagagattcaaacttcggggtccaatcgagcacaagttcgacctcttgttttttcccgggaaatataagcatcgcaaattcgttttcgccgattcttgaattgagactgatggaaagatctatcaacgcttctttaacggtcggaagcttcggattcatgcttgcgcttgtatcgacaagaaccagtacatgaagatgcacggtctcaccaagctcgtcaacgacttccatgacttcaccgcgtttatcaggaggcagttcatccatttcggtatgcttgccgagaatttgtttgagctcactgttgaccacgccttgaagggtttgcgtcatcgccttttttgtcaccatttgaacggtctgcgacagctgcgacgtgtaaaccacctggtgaactcctccgcctgcgagagcgatcccttcgacttctttcatcgcctcctgatccatttcatgctcgtccataatcccaatcacattcacggtaattccctgctctttcgcaaaggcagccatggcctgcgggtcttcgccgcggtttgaacagccgtccgtcaaaagcaggatttgattcaaatgcccctttttcatcgtttttattcctcctggacaaagatatcttgatttagttccatcatcgccagaagaaatttgatttatacgaatgctaagaaatctcttgattcttttggaaaaaagccggcgccggaatggaggcccactttggcgtattatggtccagcttgatgacaatcaccgtcatgtcgtcctcaatcagacccgaccttgtccggatcacttcttccatgattaagtcggcgatttcctgcggctcctcggttttcagcgatttcaatttgcgcttcatccacagatcatgattttccacatgtctcggcccttcaaagattccgtcgctcatcatgatcaaaaggtctcccgcttttaattgctcgctgacaacatcgacatcgaattctgtaatgatgccgatcggcagattgctggcctgcacttttataatttgatcgcctcttttaataaagctcggggtggagccgattttcaaaaacttgcagctcgcatcctgaagatcgatgaccgataaatccaatgtcgaataaatttcatctgttgtccttaatgaaagaatgctgttaatcgttttaatcgccactttttcgtcgatgcccgacttaagaatcttttccagcagcttgatcgtctcattgctttcaaaatgggcccttgcgccatttcccataccatcgctaatggcggcggcatatttgccggtgccgagctccatcatattgtagctgtcgccggagacaagccctccgccttttgctgcatgcgcggctcctgtcaccaccctgtatgacttcgccgaaccgaaggcaacatgacaatatccattcggatggccggcgcactgttctgctttgacgataatttgttcttccaaaatatcggacagcatcggagcgatgattttttcacactctccatggccgttgcaatacgggatactcatttcaatatcgatgtttccctgctcaaggctgtatatttcgacttgctgaatctcgatgccgaagtgctgcagcgcatcccgaatttgctcttcttgaataaaatgctgctccctttccctttttatttcccgagaaaagtccgccataacctgagaaacgccgagaagctgctctgcaacgagacgtctgctgtcatgcaccttttgttttaatgtctggttcgccctaaaatgagtcagctcgtcttcaatcagcgcttctacttgctttgatttggagcagtgctgatgaaactcctttttcagcttgcggtttttaaaatattgcttttcttccgtttcctgcataacccgtttcatcaaatcatatgttttatcaaagttctgaacccagcacttgtttttcttatagcatgactgacaggaatgttctgtcaccgtgctcaaaaacagatcgatctctttttcttttccttcatcgtccggagctgaatgataaaaggtagcgaagctttcggataaagcgtgaaaaacgttcgaaaactgatcgactttttgggcggtgacatcgcggattttccttgcatactgctgctgttcctgggcgtgctcagtcgttccaggtatatacttggccacttttttcgtaatcgactgaggggttaaaaggaacaggccgattgcaatcagagattcataaagcgtcggcactaattcagccgaaccttctccgtacagagaaatcaatagagatccaatcaataagccgaccgctgcgccgaacttttttccttcttttagcaaaccgccgagaaggcctgagaaagccagcaggctcatctgatataaattgccgatgtttgagaggctgagaatcagcccggtcacaaccccgactgtacagccgatgcttgcgcctccgatgaacgcgaaagcgagcacgacataacgggccaatatcagttcagcctgcatgccttgaaatgaaacgcctgtcaagcccgtgagaacggaagcgattaaaatcataaaacaaatgatctcttcaattttcagcgactgtttcgcccgctttgatgtgacaatcggcaggctttgcagaaaaatcaatgtgaggataaacgataatccggcttcaacgaaagccataatatagtgataacctgaaaccgttccgtattcggcatatacgaatccgcatcttgtcacagccatcgccaaaaagacgacgacaggcagcgttctgacacggtcttttataataagggacgtcatttttgtacatatcgcaaatgcaaacagagccgcaagcacgaacagcgaatgctgaggcgatatgctcagagctccggcaagaagcgccaggcatgcaaggaaagctttatcttttttgattaaaagcatcgctccgaaaaatggaagagcaaagggaatgacctctgacagaatgaaggctcgtcccaataaaaaaccgatgaccatatagatcagccctttataaaaaaagagggaatataaatgctgcatcataagcttcgtcatgctgccaaaccatgaatacaatttttgaacagcaggtccagctattgggctgttcactcttctttccgctttttccatgctctcatctcccactcgtttattcgttgcttgccattatagcgaaagatgaaataggattttgtcaaaagaaggtaacgaattcaaagaactgttcgacgctttttgtagcatgcttcaatcactcttgataagtcgagtccattcccgttattttgcatatttttatgcagcaaaaaaccggcttcagaagaagccggtttccggaatgacccgtacgggattcgaacccgtgttaccgccgtgaaagggcggtgtcttaaccacttgaccaacgggccttcatataagtagcggcggaggggatcgaacccccgacctcacgggtatgaaccgtacgctctagccagctgagctacaccgccatgttgttgatttcttttaacgcacaagttctataatacaaaggattgccctatccgtcaatagaaattttaataaaaattttattagaaaataaaaaggcatccgttgggataagacgaatgcctttcgtttatatagaaagcagcaagttaacctcttcttgctccgcgccctccacgttttgattccgtgttgcgttttagagacgataagcgatcttcactgtcttttaaaaacttattcattttctgttcaaacgtttctttagagcggaaatcatttttaggtctcgcaggtcttgatgattgaggacggtctacagcctttttgatcgataagccgattttcccatctttctcaacattaataactttaacttctacttgatcaccgaccttcagatgatcattaatgtccttcacgtagttatcggctacttcgctgatatgaacaagacctgttgatcctccaggcagttcaacaaacgctccgaaatttgtaatacctgttactttcccttgcaacttgctgccaacttcaatcgacataaaaaaagtgctcctccttagacttaaaaaagatcatttgtttaattatacataaagaaaaaattaagtgtcaacaaggctacttgctcttatcttcaaacttgaagatgatttcgccatcctttgagaggtagtaatcctttctggcaagctctgcaacgtagtcctcgtcctttaatttcacaatctcatctttcaaatccgatttttttgcttccagctgttccaattgtttcaaaagctcagctttcttctcttgcttcgcgctgatatccgaagtctgcgaccagagcgagctgacaatcacaatcgccgacagcagcacaacggcgccgaaaaccatcaaccgtctgtatagaccgcgtctttttcttttcagctgctgctgttttcgctccatctgctctttgtattcgttctgtatttgcgatatgttgcgtcttgtgggatcattcattccagacggcctcccttcatttttttaaaagttttgccttaattgttatgaatagtttcttccccttttcgaaaaatcctgctcctttttgcaaaaagcgtctcaacaatccccgaaccggggcgggaagaagcctgcagcattgatatagtataaaataaatcgggtatcctgcaaattttaatatcttatataaacataccgcaaaaaaacgaaaaagaacatagatatttctcattgtaaagagaatgatggctaaaatggcttgaaacgtccatacaacaggccgaaacaccatcatccgcatcatctttgagcccagcctggagatgaatataaaaaaggaaatcatccattccaaaagcttgatatagacctgcttaaaaaggctctgataagcggcaaaaccaagcatgaccgccagaaagatataaattcggaattccccttcattcacgctcagcaaaacatagaaaaaaaggaggccttgtactacccaaaacaaaaagtcatggagaaacaacagccaccttgctgttttcgagcgaacgacaaaacgggtataggtgtcaagggaagcgccaagccatgcccccattccggccatggccagcatcgtatagaactgtgtggtcagcgtcatttaaacaacttgctaaaaaatcctttagctttctccccctgctgctcatccaaatagacgagatcaagcactcttcccttgatggagacaacgcctttttccacatcgagattcttcatctgcaggttttcgcctctgactgcaagcatgcccattaccgtctcaagtaaaaattcctcgttgtcaaagctctcgacctgcttgacaccggatatatccagaagcttgcggcccttcatcgtcacattatgttcaggaccagatgccccgccggaagggttgtgctgatcataatatacattcatcgattcatcccccatatcctcatactaaagattcgatactgcattgtatgagacgggggatttttttagaacaagcctattctcctcccagcttctcctctttgagaacggtatacatatcagcggcttcttctttttttgtcgtatccttcaattcattgactttgacggttacaagtttttggccgaaacgcaccgcaagctcgtcccccgctttgacaacagagcttgctttcgcctgctggccattgatcgaaattcttccctggtcagccacttcttttgcaagcgtccgtcttttaatcagccttgatactttgagaaatttgtcgagtctcatcgcttgtcagctcctttcaatgcctttcgcttcattccacagttcgtccatttcttcaagcgtcatactttccagatccttgcccatgcgctttgcagattgttcaatatatgtgaaccttctgtaaaacttggcgtttgtcatcgcgagggcttcttccggttcaattttataaaaccggccgatattgacgagcgcgaataaaaggtcgccgaactcttctttcatttttttgctgtgctgttcggcttcggaaatttctgaagaaaattctttcatttcctcctggactttatcccaaatatcctggacattcgaccagtcgaacccggtctttgccgcctttttctgaagcttgttcgcttttgacaaagcaggaagcggctttggaatatcgtcgaggagggatttatcgtccgcttgtttctcctgcttcttgatctcttcccagtttaccatgacgtcggcctcatcacgaacagagacctctccgaagacgtgcggatgccttctgatcatttttgcggtgatgccgcgaatcacatcgtcaattgtaaaaaggccgtcatcctcgccgatctgcgcatgcagaagaacttggagcatcacatcgccaagctcctctactaagtggtcgggatcttcttcatcaatcgcctctagcacctcatagcattcctcgattaagtactttttgagcgactcatgggtttgttttcggtcccaagggcaaccgtccggtccgcgcagctttctgatgacactgcggaacatcgaaaattcctggtggagaatctcttcgtctttgacaggcggcacatagacgctcgttaaattattgatgcccacgcttctgtccaattcgtaaagaggcactgtccgaatgtcttgcatgctgcttccggccgctgttacaatgacgacttcatagtcatcaggaagcttttccattaacgtcagtttgacctctgaagccgtcatttgatcatatacctggcaaataatcaaatgatgacggagctcgacttcgtcggctgaaaaccggacggcatcgacaaactgaaacccgtcaatcggatcgatctgcaaagcatttaacgtcgcatcaataaagctgtggcctccctcgacgacgacatcggcctgatgagccccacgcctctcaagcaaaagctggaccgttttttcagcgacgaacggatggcctggaacggcatagagcacatccccctgcttcgcctcctcaaaaagccgctctacgatctcctcgtaaacatcttcgaattgatcatgcttttcatagacctcatcaaaaaaatgaatctccgctatttcttttttcaggtcttctattaatggatggtctttcgtcctgacataaagaacctccgcttgtgtgagccgtttatatacaccgagggttaattgattcatatcgcctgccccaaggccgactaccgtgattttaccggccatgcctgccgcccctttctcgttttaatgtcaggagcttgctgccaaaaggcacaagctcaagttctttttctgaaaacacgcgcaatgtgaagataccggacaaaaagacaacgccgccgacgaaaacggcgctaagactttccgccgctgagatccatctgcttttatgtggtatggccgcttcaaatgcaaaaagccacaccgccagagcggccgacatgatcacagccgacaacaaaacacccgctatcctgtattccgacagcttaatccagccttttcttttcagctgaaaaaaattgagccccgcaacagcggcaaatgacatcatagtagcaaaagcagcgccggaaatgccgaaaccggggatcagaagctcgttcaatacggctttcaccaaaatgccgcagcagacgaatacagccggaagacatgtattgccgagtccttgcaaaacagcagtcatcgtcatcgccagcgatgcaaagagaatcgacgcgctgaaaatttggagcgcagccgttccatcgctgtttttaaacagcatgacattgaccggctccaaaatacaaatcagaccggcggctgctccagtgccgatgacaaagctcatttttagcgaataccggatcttttcctccagcactgcagtttctccctttttcttcgctttcgtaagggacgggacaagagccgtcgcaatgctcgcagcaaaaacggttcccagctgcaaaagcggctgccccctgtcatacactccttttgtatgtttcgcctgaagttcgcccattccttgtccggccagcaatgaatacaagtgcaatgcgtcgacgagctggatgaggatcagcatgaggccggcggtacaaatcgtaaccgaatacagacacagctgttttaaaatatcacccgtcccggcctcaattcggacggcagtggctttcttttcacgcttggcccaaaacacggcgagaatgaaaaacgccgcaaggccgccgacaagagagccaaaggccgcccctgcaccggcgtcatataaggaaaagccgcttttgacgagccaccacgtcaaaacaagaatcgccccaacccgaagtgtctgttctccaatttgagaaagtgccgtcggcagcatccgttcgcttccttgaaaatagcctctcagcaaagacacaaacggaagcagcaaataagaaaacgacacggcgcggatcaccccggcaaggtcgagatcgcccataaaccctgcgatggctccagctccggcaaacaagagtagaaaaaagccgaggccgacagccgataaaaagagcatagacacgcggagaatctttgcccggtttgcggacccgtaatcattcagcaactttgaaatgatgaccgggaacccggaggtggcaagcatgacagatattccgatcatcgggtacacctgctgaaaaatataaaaaccgacatctccaactatattttgaaaaggcactctatatacagcgcttaatatctttgataatatccccgccaatgaaagtacaaaggcgccttgccaaagcaattgtctttggccctttaaaaaccccattcctttaagctccttccaatgcgctttctaaaaagcgcacgaaacgagcttattataccatattcagggcttgcacccctcctgcaagtgtgaattaaaaaagaacagcccaaaaggtgctgttccaatgctgatgctgattcaagctgagaaaaaacactttcggcattccggctcgtttgagcaggaatgtcaaaataaaaggaatgagacctattgttccatttgccgggccaaaaagccggcggcagtttcaaccgctttatgttccacttcgccgattgactggtcttttgaaaaaatgacaaccgctccgatcgggtcgccgtttgcaacaatcgggccgacggtataagaagcaacctcttcgtcaataccatcaataagctgaatcgtcttcgcgtctccgtccaaaacagaagtgcgctgatccatcgccttttcgaccatgtcgctgatcgatttgtttaaatagtcttttttagaccccccggatactgcgatatacacatcccggtcgcaaatcagcacggaatggcccatgctgtcataaagcgcatctgcatactcttttgcaaagtcgccgagctcgctgatcggagaatacttttttaaaataacctccccatcccggtccacaaatatttccaaagggtctccttcacgaatgcgcaaagttctgcggatttccttcgggatcacgacccggcctaaatcatcaattcgacgtacgataccagttgctttcatctctgctgcctctctttcatttgatgatatatctggtggatataaacagagctgtgtacttatgtaacactctccactcttgattggttttagtatccttcacatcaaatgtaatatacgcgagaaacaacaaatttttacgatgaagcgatcgtttgctttttaacgttttgaaggcccttcaatatgtcgagaagcgtttccagccattcctccggttttcggtttttcacttgaatcgagattttcaatttcttcccttccattccaaggccgatctgtctgccgtacttgctgccgagttcaaacagtttttgaccgtcaatttcggcactagctttttcgtcaattgtcagtctgacggcgtctttatcctgtttgatcagctcgacgcgttccttgatggcatataccttcgcctcagcgatggcgaataaatattctacttctttcggatattcgccgaagcggtcgatcatctcgtcttgaagctcgctcttttcttcaatggttgaaatcgctctaaaccgtttatacatatctattttttgcttgccgtctgtcacatacgtctgcggaatatatgcgtcaagctccaaatcgatttccggctcaaacttttcagcttgcggtgcatctcccttgcgcgcctctattgcttccttgagcatttgcgaatataaatcgaaaccgacagaatcgatgaacccgtgctgctgcgcacctaaaaggtttccggcgccgcggatcgtcaaatcgcgcatcgcgattttaaatcctgacccgagttctgtaaattctttaatcgcctgaagccttttttcagccacttccgttaggactttgtccttccggtacgtaaaataagcgtaagctacacggtttgagcggccgacgcggcccctcagctggtacagctgggaaagccccatcttgtctgcgtcaaatacgatcaaagtattgacgtttggaatatcaacgcccgtctcaataatcgtcgtgctgactagtacatccgattctccctctaagaagttcagcatgaccgattcgagttcgttttctgtcatctttccatgggcgtacgtcaccttggcgtcaggtacaagcatcgagatttcttctgcttttctttcaatatcctccacccggttgtacaggaagtaaacctgaccgcctctggccagctcgcgttctatcgcttccctgaccaaggccccgttgtattcgacaacgtacgtctgtaccgggaagcggttttccggaggcgtttcaatgactgacaaatctctgacaccaagcatggacatatgaagggttcgaggtatcggagttgccgttaacgtcaaaacgtcgacattcgctttaatgcgtttaattttttccttatgtgtgacaccgaacctttgttcttcatcgatgataagcagaccaagatctttgtatacgacatccttggacaacagcctgtgagtgccgatcacgatgtctaccgttccgtttttcaagcccttgatcgtttcatttgcttcttttctcgtccggaaccggctgagcaaaccgatattaatcgggtagtcctgaaagcgctccaatatcgtttcatagtgctgctgtgcgaggatcgtagtcggcacaaggatcgcgacctgttttccgtctgcaatcgccttaaaagcggcgcggatcgccacttcggttttgccgtagcccacatcgccgcaaaggagccggtccatcggtctttctttttccatgtctcttttaatctcatggatcgatctcagctgatcctctgtctcctgataaggaaatgcggcttcaaattcacgctgcatttcatggtcgggtgaaaacgcgtagcctttgcttgcttctctttcggcatagagcttgatcaagtcatcggcgatatcctgaacagagctttcaacctttttcttaacccgtttccattcgcttcccccgagtttataaagcttcggctctttaccttcggaaccgacgtatttttgcacctgatcaatttggtcaaccggtacgtaaagcttgtcgcttccctggtagtgaatattcaggtagtccttatgaatgccgttgatctccaacgtttcaatccctaaatactttccgataccgtggtttacatgaacgacataatcgccgatctgaagctccgagtagcttttaatccgttcggcattggtcagtttttgtttgcgcgcctgctttttgacacgctttttaaacagctcttcctccgtgataacggccagcttgatcatcggaagctcaaaaccggattgaagaccgccttccataatgtaaatctggccttgggcgagcgctgcatcctggtcggcctgtgcggcttcgatgtcatagtcggacagtacagatgctagtttttcgacgcgctctttgctgtctccgagaaaaaccgtcgtatatttcgattttttaaaccgttcgatctcatttttgagcacattcatttgtccgtgaaagctctgcatttgcttgcttgaaacattgacgatgttttgcggactggtgtgctgcacatgccttaaaaacagcgagtaatacaaaatcgggcgggactgttttgaaatgaggctgtgaaaaggaaatgacatcgatgtatcatgaaggattttcccttcttcaagcaggctcgtaatccattctgcctcttccttttgcagctggtcttccatttcatgaatacggctgatttcatctagtataagcaaggtatttttcgggaaataatctagtaaactagcaggcttctcatagaaataagaaaggtatttgaccatttcctggccgatatgcccttccttgagccgctctttgtcttccgcgatattttggtcgagaatttccttttgtttatcgagcttcagctttttaaggctgttggcaaggccttgatcgatttgttcaagcgccctttgcctgtcttcatcccgcacgatcagttccttcgcagggccgatcgttacttcatcgcgcgtttccagtgagcgctgatcatccgtattgaatatacgaatcgagtcaacttctgtatcaaacaattcaatccggacaggattttcttcagtcaaagagtagacatcgataatgcccccgcgtatgctgaattcgcctggcgccgccaccatatctgtacgctcataccccatttgaacgagcttctggagcagctgttccgtgtcaatgtcgcgccccgtctcaatgtgaatctgactgttttgccatacttcgacaggaggcagcattcttctgacggctgctgccggagcaacaacgataggcgtttcaccgcttgcaagcctatttaagacatcaagcctttgcgagcgcagctcagggcttgccaccgctatttcagaagaaatcaattcgttgacaggatataaaaggacaggctgatcttttatcagccctgttaaatcatctgtaattttttgagcctgataaaggttatgcgtaattaaaaataccggccgtctcgtttcttttgtaagagcggctgtaaataacgaccgggcagatccggagagccccgcaagcagctgttccttcagcccttcgttcaagccgttgacgatggatttaaaatcatcgctttttgttatataggattgaatattgttcaaatgagcccctcctctcttcctcaaatagaaaaatgctttggtctagtctctacaccaaagctatctattgaataaatgaatgatattggtgataatccgggtttcgctcaagcgcttcttgacaatcttcacatatcgtcttcacgtgtaaatccccattatccatataagaaatcatatcgtttctttcatcatttgttaagtggttaaagcctaactgttcactgtttacataagaatggtcaagacttccgactttaacgccgcaatgccggcaataataatgtaaagccataaaggaacctccataccgagtctttttaagactagtatgttccgttcccttttgccttatacctttgcgttaaattcattcatgacttctaaaaaaggtttttccaaagaagcttcacaggccttggccgattgtctgacggcctcttttatcgccggctcttcttcatctgtaaaagcgccaagcacataatcgacgactttcatgccgtttaccggacggcctattccgattctgatccggttaaactcacttgttcccagatgctgaatcgtcgatttgatgccgttatggcctcctgcgcttcctttcgtcctcagacggattcttccggtcggaagatccaaatcatcgtaaatcactttcaaattgtcaacagggatctcgtaatagtccaaaagcggcctcaaacattctcccgataaattcatatatgtaagcggcttaacaagtagaacctttttgccggaaacaaacccgattccgtattgtccgttgaactttgttttatcaagcggaatgttccactctttcgagagctcgtcaatcgtcataaaacctacattgtgtctcgtattttcatatgttttacccggattgcccaatcctgcaaacacaagcattattctatatcctcccttaagcaaaaccctgcctcagcatactgagggggagcatcctaatttcccctcattctagcacaaaagacgtaaccgcgggcggattacgtcttacgtatttattcttctttttcctcttcagtgcctttttctggttcctcaacgtcttgagcagctgattcggcttctgtttcttcctgcttttgaggaggaagaatggatgcaacaacttcatcaggctcatggttgtatgaataatcgcctttggtcggaatatcgccgacggttagaacatcattgacttcgagactggaaatatcaacctcgatcgtctgcggaatgttcttcggctttgctgtgacagacagctcgtaaagcggctgctgaagaacaccgccctgtttgatgccctctgcttcacccgtaaggtttacaggaaccgtcgcctccatttccgcttccatatcaaccactttaaaatcggcatgtacgattgaatcttttaacggatccgtctgcagctcagtcaccataacagagtgttggtcaccgtttatatccaagttgataatcgtatttttgccctcagcgcgcaagatttttaaaagctcgatactgtctaacgcaacggatttgttctccagatttcttccgtaaatgacacccggcacatacccggattgccgaattcttcttaaagaagaccgtctggaatccgttctttcttccgcttttaaaattgccattttcagcaccatcctatcgttagattggtctttctaaaaccattcccataacgacaaaactttaaaccagaatcagcaaattaatcgaacaggaagctgacagattgtttctcatgcacacgaataattgcttctgccagaagcggtgcgacagaaagctgcttgaatttcgcgattttcttttcttcaggaagctcaatgctgttggtcacaacgagctctttaattttggaattgtcgattctttcgatcgccggaccggaaagaaccggatgtgtacagcatgcatacacttcctctgcgccgctttcaacgagcgcattggccgccagcgtaatcgttcctgcagtatcaataatatcatcaattaaaatggctgtttttccttcgatatgcccgatgatattcataacctcggctacattcggcttaggtcggcgtttgtcgataatcgcaatcggcgctttcaagcggtccgccaatttgcgggcacgggtcacaccgccgtggtcaggggacacaatcacgatatccttgaaatttttctcttcaaaataatttcctaaaatcggaacacccattaaatgatcgatcggtatatcaaagaaaccttggatttgcggcgcgtgaagatcaagtgcaatcacacgggtagctccggcggtttccagcagatttgccacgagtttggctgtgatcggctcgcgggaacgcgctttacggtcctgacgggcatagccgtagtaaggcatcacgatattaatcgttttcgccgacgcgcgtttcagcgcatccaccatgatcaaaagctccatgatatgctcgttcaccggcgcgctagtcgattggatgacatagcagtcgcagccgcggatgctttcttcaatgttaatttggacttcaccgtcgctaaagcgtttaacagaactctttcccagctcaactccgacgatatccgcgatttccttcgcaagacccggatttgagtttaaagaaaaaatcttcaaattgtcgtcttcatatttagacatggtaaacctccgatttaggattattttttgtgtatgttctcagcgtagtcttccttattgacttgtcttgctctggcaatagacaaagcccggcctggcacatcgtcggtaatcgttgaacccgcagctacgtatgcgccttcgccgattgtcaccggagcgaccaaattggagttgcagccgataaatgccccattttcaattttcgttttaaacttatgtttcccatcataatttacggtaatcgacccgcagccgagattgacatccgttccgatttccgcgtcccctatgtagcttaaatgagatgctttgctgcgatcaccaaattccgattttttcacttcgacgaaattcccgatccttacctcattgccgatctttgagtcgggcctgatatgagcaaacggtccgattgtaacatcgtcgccgacttcactgtccacgataacggactgcttaatgaccgttctgctgccgaccgtactgttttccagttcgctgttctgtccgatgaccgcgtcttcaccgataacaacccgccctttaatgacggtgccgggataaatcacggtatccctgccgatcacggcttccggtgaaatgtatgtgttgtcgggatcgattaagctgacgccgttctgcatgtggcgtttattgatccgctgcttcatatagatttccgcttgtgatagggcgactctgtcattgactccgagcgtttcctggaagttgccagtctgataagcggctacagtttcaccttgatttttcaagatctcaatgacatccggaagataatattccccctgtacgttgtcattggaaacctgctcgatcgtttgaaaaagagcttcgttgtcaaaacagtaggtgcctgtgttgatttctttgacaagcctttcctcttctgttgcatctttgtgttcgacaatctttgcaacatcgccgttttcattgcgaataatgcgtccgtagcctgtcggatcttccgctacagcggttaaaatcgtcacctttgctgcttttttctgatgctccgtgagcatggcttccatcgtttcggcagttaaaagcggggtatctccgcagatgacgattgttgttcctttttcgcttccaagaatcgacttggcctgcttgacggcatgggccgtgccgagctgttcagcctgcagggcatattcgcttttttccccgagctgttttttgacatcttccgcaccatgtccaactattgtgacaagtttttctaatgatagcttgcgagcttcatcgacaacatgctcgaccataggttttccgcaaacaggatgaagaactttatatagctttgatttcattcttgttccttgaccagctgctaacacaactgcaaaccgcttatccatgtattggcctccattatccctattatccatagaaaaatatatcctaaatatgagttgatttcaagcaagccaaaatgagaaatcgggaaatcaagacagcatattttggatgtttagagcatatttaggattaactgatcagggagacggattgattccttctgcatgcgctttgttatccgagttcgtatgctttaccttcctgctactgttatacgcagacacaaaccatatattgtcattttattatgataagatcattttttttcaaaacaaaaagggcttatccataagcccttcttttttaagaagctccagcttcttcatattctatttcctcaacgtcacccaaacgatgatattcatttaacaccgcgtcctgaatttttccgcgggtgcttgagttgattggatgagcgatatcacgaaattctccatcaggtgtacgcttacttggcatcgcaacgaaaagaccattgtttccatcaattacacgaatatcatgcactacaaattcgtgatccagcgtgatggatgcaatcgctctcatgcgaccatcggtattcacgcggcgtaatcttacgtcggtaacttccacagtagttcaccaccttttcccaatataaaaacattagtgtaactattcaacggctttttttgttttcctgcataattaaaaatatttttgtaatattgggataaaaaaacactgaattgacaaattttccaaacaaaaaagatgattttgagaccaaaaccatcttttaagagttctttctatttcactaatgcgatgacttctatttcaacaagcgcgtctttcggcagcctcgccacctcaacgcatgatctcgccggtttgtgggtatcgaagtactgtccgtaaacttcattcacctctgtgaattgattcatatccgccagaaacacggttgctttgacgacagtctccagagaggcgcccgcttctttcagcacggcttttaaattgcggaaaacctggtgcgtctgttctgtgatgtctccagtcaccatttcacccgacggggtcagcggaatttgccctgaactgtaaaacatattgttgacaacaattccttgtgaatacggtccgatcgccgccggtgcttcttttgtctgaacaacctttgtcatctcaaactccccatttcctattcatcttctgcaaaaaaacgctgaaaatttccgttttgtatttccacctttttttccttcatatcgatttcagaaagagtcaaaagggacatatactcatcgaccagccgctccttgactccctgagcttccacaagaacaccgatgcccgctacatgggcattgaattcatcgagaagattgatcatgccgttgatcgttcctcccgctttcataaagtcgtctatgatcaaaacgtgcgagcccgtctgcaagcttcgttttgcaagagacatcgtctgaatgcggttggatgatccggacacatagttgatgctgaccgttgacccttcggttaccttattgtcttttctgacgaccactgtcggcacatcaaggtagctggctaccgcatatgccaaaggaatgccttttgtcgccaccgtcatcacgacatcgatctccctgtctgaaaaagcggaagcaaaaattttgccggccttcgttaatacagagggctttccaaggatatcggttaaatacaaatatccgccgggcaatatccgttccgaatcgatcaatgactcaccgagcgactttacaaattcctccgcttcatcgcgttttacctttggaatgtatttaacgccgccggctgctcccggcacggtctgaagcgttccgattccctgctgctcgaaggtctgcttaatgatggttaaatcttcactaatggatgatttagcagattgataccgttctgaaaagaaggttaatggcactaagacatgcggatgggtcaacaaataatttgtcagatccaccaatctgccgcttcgacgaaacttcatgcacttacctccaaaatccgaatatttttaaaaacaatataacttaacatacggatttaatcaagttcattttgttctccgatcatccgcaccgcataaacctgatcgcaaaaccctcttaatccgttatagattctttgcacttttgattcgtattgaacaagtccgaacacagtggggccgctcccgctcatcagcacagcatcggcgccgaaccgcttcatttgatttttgatcatcgcgacttcggggtgcatattcaatgtaacagattcgagtacattgccgagcttgtcacacattttttgaaaattcttctcttcaatcgcagcaatcataccttgaacatccggatgttcaatctcgtcgactttcagctgcttgtacacttctgcagttgatacgccgatcgtcggctttgccagcactacccagcagtgcggcggagtctcgatatgacggattttctctccccttcccgttgcaagagccgttcctccatgtacgcaaaaggagacatcagatccgatctcagcgccaagctcagccagttcattcatcgaaagcttcaaatcccacagccggttcaatcctctgaagacggcagccgcatcgctgcttcctcctgcaaggcccgcagcaatgggaatcactttcgtaataaaaatggaaaccccttttttaatgccgtagcgttctttcatgagcattgcagcctgataagcaaggtttcgctgatcgtcgggaacaaagcggttatgcgaagaaaccgttactttatcttctgccagctctgttaattcgacccgatccgccaaatcaatcgtcgtcatgaccatctctacttcatgatacccatctggacgtttgcggcgaacgtcgagcgacaaattaattttagccggcgccttctctaaaatacgcaatccattcacctacttctccatctaaacataagtatccacattgtaacatattttgaagtacaggacgtacaaatgcatgcgcctgaggcaggacgcctcgctcttagcatgcggtcattcctcgcaagtacaaatgcatgcgcctgcgcaggatgcctcgcctttggcatgcggtcattccttcagattgcgaatgcgcccctcgccatgattcccaggtcgcttacagcggctgaacactgaaaacggatcaatgaaaaaaacggaggacagaagcgtcccccgtatgtcactgttttaatgattttgctgattttgagccatatgctgttcggctaattcgatggcccttttcaccatgttgccggcgtctctggcccgaattccgccccagccctcggtctttaccgtatcgtaaaatccaagatctttagccaattcatttttgaattcctctgacatgatgcttcgacgtctgcccatgcgaaacagcccctttcaagtatcataccatccgtctgactcatcataaaacaagtgacatgtattagctttgctcgatttgtgcagaacttccccgaaaaattttggataaaaaaaggcaaaacaaaaagcagcaaacataaagtccactgcttattaaagggctactgagctggttttatcatcggaaaacctcaattcaaccgtctcagtaagaatatccgcataactgtatgaaactctttcaaacgaattctcgtcttggtctagttgtatcacaaaaacagaagggtacgtctcagctaaaatgcccgaacgctcaatcgtttttcggcggccaccgtttgcttttaacgtcagcctttttcccaaatgtccatcaagcgatcttttaatatcggacaacgttttcgccattgcatccacctcactatattcagtatacaccagaagcccatttttgtcaaataaaatttaaattatatcaacgttcataagcctctgtcaataaaatatttgtgacaaattatacgccgactttcccttattttcctcatttttcgtttcattatgtatgtttttaaaaaaaaggtaaaaacatttcgtgtgcatagcaaaaacccgccatccggcgggctcgtttaatcgtttgcttttgttttatatggcattccaatacgcaatacgccccgcgtctcaatacctccgagccccttttctctcgtcaaggtatttctgagcacttcccagacgttaatgcggtccataaacggagtgaagctgatttttgcgactatatagaccggatcaagcgcatggatgttgactctggacggagagcttgcgaaatttgcaccggctctgatcagtgattcaaaatgggactggcatgcgccggcaaaaatgacgagctgatcaagatggggaatttttcttctcgctttttgaacggtttcgataaaatcttttgaatgcctgtaggcatccagattgttaatatcgcccttctgcttagaataggcatcgtgtccggtaatgacgagaagatccgggcggtattcatcgatcagttcctcgatgactgatgacattttcttttcatagcaatgaatgccgtatacaggaaccccgatcttttcgtagagcgccagacactttttcaaataagccgaatccccgtctaaatgaaggactcttccgggcatatgaaagtactgctgttgattgttatattggtttgtggcgcggtactcatgtttatcgtgaaggagtttgtaatcctggcggagaagatcgagggattccttcattctcgtttcttcttcccgctttctcatctgccgctcagcctcgcggacaatctcaagatcccccaaatgcgcgtcagcgattaatctgacctcatctccgtgcaaaacggctacaggttctccatttgccgattgatcaattcttataattcgaaataaaatatctcttcgataagattttctgacgaccatatcgcctattttaaattgcatgcttttcactccacacatagactaagccccatcctgatgaacatcaagcaacgaaaaagtaaaggtgcttctttagcctatgtgcctgcccttcaagtggtgaacggatgacaagcctgatcaggcttaaagcccggcatcaataaaaaaagccccccattaaagaaggacttctctcaagcggtcagataagacggcgaactcttcaatgctaagcgactctccgcgtcgttttccgtcgatatgtgaatcctgaagcgctctttcaatttttgatttattctctttgccattcggcagattgttgacgaggttgttgaaaagcgtttttcgacgctgtgcaaagcttgcttttacgacttgaaagaaaaaggcagcatcttgaacggccacagccggctctttcctcagcgtcagcctgatgaccgcggaatctacgttaggctgagggacaaatacggtctttggtacattcatgaccgttttggcctccgtataaaactgcaccgcgatggaaagggacccgtattcctttgaagaaggttttgcagccattcggtccgccacctctttttgaagcatgacgacgattcctttcagcggcagattttcttctaaaagcttcatgatgatcggagtcgtgacgtaatacgggaggttggcgacaaccatcacctcattgcagtcttgaaactgttcgtccattaccgctcggacatcggccttcaggacatcctggtgaatgacagtcacattatcatacggagaaagcgtatcttctaaaatcggcagaagccgttggtcgatctcaaaggccgttactttcttcgcacgctttgccagctgctcggtcaatgccccgatccccggaccgatttcaatcacgcctgtacgctccgtcacaccggcatggtcgacaattctgtccaatatgttcgtgtcaatcaagaagttctgccccaggctttttttgaatgaaaatccgtatttattgagaatttccttagtcctaattggggtggcgatatctttattcatgttcttcctcccgcagcacagcatccagtgcgcttaaataatcactctttttgatctgaaacatttgcagccgcttttgaagctgtttcccatttgtatagccgatattcaatatttcgccgagccgctcccgcctttgttttgccagcgggcctccgatcaggccggcttcgattaaatcccgggcctcaatctcaggttccgtcgcttccatttcctcctgaacggtcattaagcattcgcggatcgcttcaagcgaagcgtgttcgacaccgattccgcgtttatttttaggctttgccaaatgcttgggcaaaaatgcatgcttgcagccggggaccttttctgcaatcgtttttctgattttttcccccgggaaatcgggatcggttaaaataataaccccgcgcgtttcctgggcgagccgaatccgtttgatgacgtcttcccctatggcagatccgttcgtttcgatcgtatctgcatcaacagccgatttgattttagcggtgtcatcacggccttcgacaacaatgatttctttaatcttcatttcttcctccgtatgttgaaaaaccttttattacatttttaaaatgattgaaacctttttgtaataaaaccgtctaatttattagaaaacaagatggatctattataaccaaaaaaacagagggcgcaaaatccctctgcttatataaaaagcataataaatgatatttagttcaacaccttgattttaactcttttgtttccccagcggtaagctgcagacttattcggaaagaatacatcgatttttcggcctttgatggctgagcctgtatcggccgcaaccgcatagccatatccttctacatgtactttggaacccagcggaataacgctcggatcgacagcgatcactttagcgccgggattatttttcaaattaacgccggtcgcagtgtggcctgagcatccgttgcagcttgctgtataagctgtagaggatacataaaattcctttcctgaggattgatttccgcgcgatacattcgcgctgactttagccactgcggcttgctttgtaccgacagcgatgattttggctttgctttcggctgccgtttcctctttaatcagttctctggaaacttccttgccgtttttcataacaacggcatagtgctttttaagcttgccatgtttaccgtcctgtacaactttttctttccccttttcaagtgaatcgtcctcttttttccggacttcaaaagggatgttctcttccactacatcggtgacttttttgatacgagtaatgtgaatcgcctgatctttcgtcagctttttatcaagcgcaggcttaacttcatcatcgccttttatgctgatcttatgatgttttaaaaagtcagcgaccgtagtcgaagtcgtccataggtctttatctttaccggcatcctttacggttactttaaaagccctttgcaaagtcagcttcatatctttcgttatttctttatcaactgaggggtcaatttgatcgtgttccgccaactctaaatttaagtctttcagaagtttgccgactgtacccgctgttgtccagatttccttttcctgtccgtcgaccgtgaaatgaacaggttttgcggcaacatattcaacattcatgttcgccgttaattttgtatcttcagcgggagagatgtgatcttctttcctcgtctcgatgtctaagcttttcagcagttcacctacggttttagcattcgtgcgaacatcctgctttttcccgtttatcgaaatggtgacttgctgtttagcgagctcatgtgctccgtaagcagttccgctccctgcgacaagcagtccagcagcaatcagaatccatctgcttttgctaagctttacggaaaacagctttttcattttttgtatgatgaaaaacgcctccttctcctcggggagattatatagagtatctacaagcctgtcaaccctcctctctattttctccgcaagcccgccatctcttttattatgggaaaaccacctcataaaagaaagaaagacttgtcgacaaagatatcctatgagcgtaaacagacatgtagaactttttagaaccatcccccgaagagacaagcttgaacaaggctcgatatcaaatcgtgtcagctgatgccgaaaagtttttttgcattttctgtggtgacggccgctatttcttcataagtcattccttttaattcggcaatctgttcggcgacaagtttgacatagctaggttcattccgctttcctctgtatggatgcggcgttaaatacgggcagtccgtctcaattaaaagccggtcatttggtatttgtttgaccacttccttcggttttttggcgtttttaaatgtgacgggtccgccgaaagataggtagaaattcatatcgatgcactcttgtgcaatttcagcgcttcctgtataacagtgcatgatcccgccgacttcctcggccccttcttcccgcaaaatagaaacgacatcctccgttgcatcacggttgtgaatcacgattggcaagccgacttcttttgccaaagcgatctgttttctgaacacctctttttgaacgtccttcggcgacttatcccaatgataatcaagtcccatttctccgatcgccacaactttctcatgggcggacaggtctttgatccaagccaaatcttcatcggtcatatcaattgcgtcaaccggatgccacccgatggctgcataaataaaatcgtattcttcaatcaattccatcgcacgcttgatcgtcggacgatcgaatcctaccacgacaatgtgctccactttttcttcctttgcccgagcaatgacttcttccaaatcctcgttaaattgctcagcgtttaaatgagcatgtgtatcaaataacatgaaaatgccacctttttaagaaattgtcgaaaaaacaaaaggtgttcgacgaaatgttacacgtggaacaccctttgcctgcatttatttgattcgcgttccgtttgctaatgaactgtctaccgccgcaagcgagagaacgccgttgtcctctccagccaatatcatgccttgagaaagttctcctcttagtttgaccggttttaaatttgttacacaaatgactttccggccgacaagctcttcaggtttgtagtgcttggcaattcctgaaacgacttggcgtttttcaaagcctaaatcaagctggagttttaacagacgatccgcttttttgacgggttcagcatgaatgacttcagccactctgagctctgtgctcataaaatcgtctatcgtgatttccggaagccgttcatgtgctttttcctcttgctttggttcttcttttggagccgttccctgcatttttgatttgatataagcgacttcgtcttccgcctcaagacgcgggaacaatggttctcctttttgaactgtcacagatttcagctggccgaagctttgaatgctgtcccaggttttcagtgacgcatccgtaacgccaagctgtgcgaaaatcttttcaggcgtctgcgttaagaacggctgcagcaatacagcagtgatgcgcaatgactccgccaaatggtacatgaccgattgaagctctttttctttatccttatcttttgccagtacccaaggggctgtctcgtcgatgtatttattcgttctgctgacaaactgccacaatgatgaaagcgcaacggaaaactccatattttcgatcgcctgctcgtacgcttcaattgtcttttgcgagaatgatgacaacggttcgtcaaaagcggtaaccgggccttcatacgactgaatccggccgtcaaagtatttgttgaccatggcgaccgttctgttcagcaggttgcctaaatcattcgctaaatcatagttaatccgctcgacaaatccttccggtgtaaatacgccgtcagaaccgaacggcacttcgcggagaagataataacgcaatgcatctagtccgtatctgtcgattaatgtgaccgggtcaaccacattgccttttgatttagacatttttccatctttcatcagcagccacccgtgggcaaaaacctttttcggcagcggaaggtccaatgccatcagcataatcggccagtaaatggtatggaagcggacgatctccttaccgacaagatgaacgtctgccggccaatatttttgataattttcatcgttttccgtattaaagccaagtgccgtaatgtaattaaacagcgcatctatccaaacatagatgacatgcttcggattgccgggcacttttatcccccagtcgaacgtcgtccgggaaacagccaaatcttcaagacccggtttgataaagttgttgatcatttcatttttccgggattcaggctggatgaattcaggattttcttcatagaaagcgagaagccgatccgcgtattttcccatgcggaagaagtaagattcctctttgattagctcaacggggtggccgctgtcaggacttttccctccgataacttcgcctttctcgtttcgctcgacatcaacgagctgggtttcggtgtaaaacgtttcgtcagggatgctgtaccagccctcatattcatcaagatatatgtcaccattgtcaagcagcttctgaaataccttttcgatcacttttttatgacgttcctctgtcgtccgaatgaagtcgtcattggatatgtcgagctttttccaaagctgctgaatgtcttctgccgcacgatcgaccaattcctgcggagtgatgttttccttctccgccgtttgctgaattttttgtccgtgctcatctgtaccagttaagtatctgacatcaaagcctctcagtcttttataacgagccatcgcatcacctgcaacggtcgtgtaggcatgtccaatatgtagcttcccacttgggtaataaatgggtgtagtgatgtaaaacgtatttttttcttgcggcatgatggaacctcccaattaaaatgtcaaaaaactcccgcccaaaggacgagagcggcatgtgtattcattcagtatatactcaatatataatccctctttatatgataccatcttagccttcaagttcaagaaaatatacattgtcgatccatcatgaatacggtcgattacaaattttttaacagaaagaaatattatacttcgacaaaaaaatgctttcattgtcgaataatgtcgtatataatcgatatgaggaaaaaccttagttcgaaagtcttgatttaagggcttttttttgattgatcatactgttttatcatcttcaattcccttgttacatcagttcttccaaggtcttttgactatatgatctaatttttacaaacaatagaaaagaaaatgattgacgtttattggaaaccttgttatgctaggactgtaaggattttgtcgaataatgacgaagataataaacacctataaaaataacaatctttcgggaggagaatgaatatgaaatctacaggtattgtacgtaaagttgatgaactaggacgcgtggtgattccaatcgaacttcgccgtacgcttggaatcgcagaaaaagacgctcttgaaatctatgtagatgacgaaaaaatcatcttgaaaaaatataaaccaaacatgacttgccaagttacaggtgaggtttctgatgacaaccttaaacttgcaggcggtaaattggttcttagccctgaaggcgctgagcaaatcattaacgaaattcaagcacaacttcaatctcaaaaataattattttgattatacaaaaaccgctcttgccgaagcaagggcggttttttagttttgaatatggtaagcgtcataaattttccgtttcggaacgccgcggtcaaccgcggtttttttaatggcttcttttgaaggatatccttcgctgatataatgctcgacatgttctttttctgaaagatgctcccaccagaccgcctcttcaatcgtttcttcacggcttccttcgatcacaaggcaaaactctccgcgcacctgttcctgttcagaccatgtgagtgcttcttcgatcgaacctctgataaattcttcgaattttttcgtgagttcccttgtcaatgcgatttgccgattgccgaatacctctctgatggccgccaaggtttctttcagccgatgcggcgactcgtaaaaaatcatcgtttcctgtctgttcttcaaagcctcgagctgttttttcctttcccgtttgctgcggtccaaaaagccgaaaaagaaaaacggctgcggcgcaatgcctgaggcaatcagtgcggtcaaagccgcatttgcaccgggcaggggtacgacatagccgcccatttcgataaaatcgcggacgatttcagccccggggtcagatattgtcggcattccggcgtcactgaccaatgcgacgttttttccttctttcagccattccaaaattttatgtccgctgctttctttattgtgttcatggtagctgacaagctgtgtctcaatttcatacacatggcacaatttcttcgtctgcctcgtatcctccgccgcgataatgtccgcctcttttaacacagaaaccgcccgaaatgtcatatcctctaaattgccgatgggagtcggtacgagatataacatacccatgtctgatttttggtcaaaactcttttgccggttgataatcaacaccctcccgtcttttttcttctatataacgttctttgttttttctcgataattttttgaaatagtactcggcctgcatcgcttctcgtttcgttgaaaagcactctgcataatggagtttaaccggcagccttgccctcgtatacttggcgcccttcccgtcattatgcgttttcaggcgcttttcgatattgtttgtatagcctgcgtacaagctgccgtcccggcacgaaagcacgtaaaagtaatggctattcgtctccatataaaatcttccttatttcatgtgtatattgatcttgttcatcatacacaaacaaaggaggcaaaattttcaggtcaggtcggccgtcttttattccttctactaaaatggtgttggcttctttgctttttttcgggtaaacaaattggacccgcttcggctcgatttgaaaggccttcatcaattcaaagatttcgagcagcctccccggccggtgaacgagagcgagtttgccgccctgctttaatagcttgctgctgacgcgaataacatcttcaagcgtgcagtagatttcatgtctggcaatggccaaatgttcatttaggttttgctccgttttttgcggcgtcttgaaataaggaggattgcatgtgacgacatcggccttattgtatccgagcacctgcggcatatttttcaagtcgtccctgatgagatgaatctgtttttgcaggttgttgtattccacgctgcggagggccatgtcatacagcctttcctgaatttccaccccggtgatggcggcttttgtgcgggtgctgagaagcagcggaacaatcccgttccctgtgcacaaatcaatgatgtttcctttttgtatcggaacgtaagcaaatttcgacagcagaacagcatctaaggaaaatgcaaaaactgtcgggctttgcacgattttcatatcttccgccagtaaataatccagtcgttcatcatcttttaattgaatcatgtcttttccctttcctaaacacattgtaccgttaaaaaggcttccgttccgccggaagcctttcttattttttatttaaaaacgagaggcagaacagacagtctccttctttgcgaacacttccgtaatggatgttgcaaatatggaagccctcctgatacaggcgagccaaattatcatggccctctccaatatcagcatgccctgtcttttctgcttttatctctttttcatcggattttacgctttttagcctttgatccgtctcttccagcctcttgcgcaaatgctcgttttcaagctgtaaatgattgttttcttcaatcatttccccgatatgctgcttgagatctccaagctggcggtaaagggacccgatttgttcttctaaacttatcactgtatcaaacaattcttttttatccaaggtttcacacctcgttaatctgtggtttgtgcagatacgacaccttcttgcaacagctcatcccacgtatattcaacaactttgtcgcagtctgtcagttcaacctggagaatgcgttcgagaatattcaacccgacgacttttgccgggccgctggacgtggcgatcacttccccgatatccggaagctgttctttggctgtttcgtattcatcgttttcatactttagacagcacatcagccgtccgcatagtccggaaatcttcgtcggattcagcgacagattttgatcctttgccattttaatagaaacgggctcaaaatcacctaaaaacgtggaacagcaaagcattcttccacacggtccgataccgccgagcatcttcgcttcatctctgacgccgatttgtctcagctcgattctcgttttaaagatcgatgccaaatctttgacgagttctctaaaatcgactcttccatcagccgtaaaataaaaaatgactttgttgcggtcaaaagtgaattccacatcgaccagtttcatctcaaggccgtgctcgttaacctttttctggcagacatcaaaggcggacagcgcagcttcttgattctcctcaacgatcaggcggtcgcgttcatccgcaactctgatcacttttcttaaaggcagcacgacatcgttctcgtctactttcttgttggcaatgacaacctgcccgtattcaacaccgcgaaccgtttcgacgatcacacagctgtctttatctatctgaaatccgttcggatcgaaataatatattttgcccgcttttttaaagcggacaccaataacgttgtacaagcttatccctcctgcagcattaaaaccaagtgctccattaatccttgagcattcacattggaataaagccgtttttttgcttctaaaacagcaagtatctggtttgtcactctttgttgtgttgtttgcagcgcatgctgttttaatgattggaataagtcctgaaatagtattttatcttcatgtcccaactgaatggacaacacgtcgcgatatataaataaaagcatatcaagacccatttcttggtggtctttctccttgaaaaagggcatccactgatcttgaatatagaaaaaagcatgtccttttcgctggtgtaagacttcatacaattttatcactttcgctcgcgactctgcaaactgatcatttcgactcaattcgagcgcttccgataaattgttggtcatattcgacaaaagggctgcaatattcggtgagacctcttgtttgaccagttccttttcaatcgattcgggctgcagcgactgaaaggataaaacctggcatctcgatatgatcgtatcgagcaatttttgcggctgttccgttaaaagaacagcgattgtatcgctgctcggttcctctaaaaactttagaaggctgttcgccgcattgaccgtcatttgatccgcatgggaaataatatacagctttttatgcgattccaaaccggtcttagaaaactcttcctgaagcgcctggatttgtccctttttaatggaaaggccgtccggatggacgacgtgtacgtccggatggtttccagattcaatccgctggcagttcctgcatgactcacatggctctgctccatcttcaaggcaaaaaaagctttttgccagaagggttgccgcgtctaatttgcccgtccctttgcgcccttcaaataaataggcgtgggcaagccgatttctttctatactattttgcaaaagcttcataacccgtggctgaagcttctgcatttctgtccaggttgtagccataccatcactctctatgtgtaaaggtttatcagtaaaccctttatttcgccaatgcgttccaaaagttcgatagaggatttttcttgatccataagatcctcagttaattgcacaagcttttcgtccagttctttcacaatgcttaatgtccggctgtttccgtacagatcgaagcttcttgaattctccaccgtcagaccgttttcaacggtctcttttacaaatcgtttgatcaagcctttgaacctggccaaatctttgaagtttctcgattttgagaggcgttttccgaacgcttcaatatctgttaaaagcattgtcagctgttcaactcgaagcttgccgctttgtatattcatcttctctttaaatgaagcagaaacattttctcctcttgcaggcggagtctgctgtttctctatcattgtacgcagttcttgacttattttcatatcctcaacccttaaaattgatggaattgctcgatcggcagtacaaaaacggttgctccgcccacttcaacctcaacaggataaggaacatatgaatcagcatttccgcccattggagaaacaggggcaatcagctgatcccgcttgcttccgttttcttttatcaagcttaaagctttgtctactcgaatatcatctacacccaacatgaaggttgtgtttcccgatttcagaaagccgccggtcgacgccagtttggtcacgcgaaaattgtgatcggtcaaagcctttaaaagccggttgctgtcttggtcttgaacaacagcgataattaacttcatatgaaaagcccccttttggatggaaacactttaaggatactcttgttaccattataacaatgaatggtaaactggtcacaactgattttcttttaatgcttcctcaatgatgttatttaccctttttaacacaagttcaacactttggctggcatccacaatccgaaatcgtccggggaaccggttcataacttcttcgtagcctttttgaacaagctgatgaaagtggagtttttccaaatcaagccggtttttctctcttgcatcatttaaatcgattcgtttgattccctcttccgggtcaatgtcgaaataaatcgtcacattcggcatcaggctgccgatcgcgaattgattaacagaaaatacttcatcaatgccgagtcccctggcatacccctgataagcaagcgagctgtcgatgaaccggtcgcataagacgattttcccttcttcaagcgccggttttactttttcgactaggtgctgccttcttgcggccgcatacaacaaggcctctgttttgggatccattgctgtatggcttggatttaaaataacctcgcgaattcgttctgatatttcaatgccgcccggctcccttgtcgcaagaacagaatggccgtttttcgtcaattggtctgccgcagcctgaaggattgtcgttttccccgcaccttcaggcccttcaaaagtaataaataaaccgttcatgatttctcctcttctatatatacagttaattgcttttgtttgagctgattgctgccctgaatgtgtacattcagatcgacgagccgcgtcagccggctgatcgtctcttttgttattctctcacccgccatgatcaacggaatgcccggaggataaggtgtgaccgattcggcgcttattctgcccgctgcttcggtaaaaggcaccgattcttttttgaaggcagacaacttgcttttccggtaaggcaaagccgtgactttttcagaagggattccgattccggcaggaagatcatttcgaactgctgtatctttcatgtctttactgattgtgctgatcagttccggcgcgggcatattttttccttcaagcggcaggatcaacaggacttgcctttcatctgccaattcaggatggatgccgtttgcttcaaatatggatttcagttcaaaaccggagtggccgtacgctgatctgatacacagcttaagcggatcttgccggatacgggcatcagccggctcgacaatatcagctccgtttatttgagaaaagacttctctcatattgatgagctctttctcaatatcggctgttcgatttgttttcaagatatcttcggcgtatgccctagctatatccaaagatgccatgattgggtaggaaggactgctgctttgaagcacggacagatagtatgccagtctgtccctgttgatcctgccgctgttaagatgcagataggaccccatcgtcatcgccgggagcgttttatgcgcggactggacgacggcatcagcgcccgctttcaacgacgactggggaaatggatggcccagcacaaaatgggcgccgtgagcctcgtcgactaaaacgggaatatcgtgttggtgggccttttctatgatcggcttcagatcaactgcatggccgtagtaatttggatatgtcaacacgatcccttttgcgtgcggatattgtgaaattgcatcttcaactgtttcgtacagtatatgtgtgggaacagccatcgcctcatcaatttccggtgtcaaaaaaaccggatgggcgcctgaaagttcaatcgcatgaaatacagacttatggcagttacgctgaacgagtatcgtatcagccggctgacaaacagccaggatcatagccagattcccaacggtcgaaccattgacgagaaaaaagctttcttccgctccgtaaagcctcgaaactaaatcctgtgcttccttgatgacgccagatggctcatgtaaatcatccagtcctgtcagttcagttagatccactttgagaatcgtttcaaaaaaagtttttgcttcatcaaaaaagacatctccattgtgatgtcccggaacgtgaaaagaataatgatgtccttcagcatggttcaccaatgctgtatataaaggtgtcttcatataaaccgatcctttagtcatcttctctattttcttcggcatccaggcgctgccggatgccgatatgacattctgcatttattatacccttcaaggcggattacataaagggcggaccatttggtaaatgttaatcttgcttatgatctacggttttggttttctttcatgtccagcagcttagccttgagaccatcttccattgcccttatttcttcttctgcctgcagccgctttgaacggccttcctcttgaattttaagcgtctcctcaagtgtaccgatcagattgtcctgcacttgtttcaatgtttcaatatcaataaagcctcgttcattttcctttgccgtttcgatcgtattggccttcagcatctcggcatttttcaagagcagttcgtttgttgtggccgacacctgtttttgagcctctactgctcggcgctgcctcaacagggtgagcgcaatagcaacctggtttttccaaagagggattgctgtcataatcgaagattgaatcttttccgccagcacttgatttgtgtgctggatcaaacggatttgcggggcgctctgcagcgtaatttgcctgcttaacgttagatcataaacccgcttttccagccggtcggcaaactgaatcatatcgtttacttcctgaacggccatatggtgatgttcagttttcgatttctcttttaattcgggaatggttttatgatttaattcttccagcttcagctgaccggctgcaatatagacattcagtgcctcataatattctttatttttttcataaagccgttcgagcatcttattatcattgatcagtgcgcttttggaatgctcaagttttacgctgattctatctatttgagcgccggttttttgataccttgataacacttcttgaacagaatgggatactcttccaaacaaacgggaaaagaagttccttttttcagttttcaattcatcggggctgacctgttcaagctttttcatgaggtcgcttaaaacctgcccaatttcaccgacatctttcttttggacgtgctcgagcatctcatgtgagaagttcaagagtttggattgagcttgcgttccatacagagtaatgctgttatggtttttcgggtcaatctgttcggccagttgaaatgcctgccggcgtttttcttcagataacgtatcaaccagattcacttgctgcccgcggagtttttcctccacgccggaaacaggcgcttctccttgtccaaaaggatcggaaagcaaatcatcaaattcaagctgtgcgccagttttgtgtaacgatggtttatattcgctcatttcagctttcctccatcagctttttttcattgaatgcttcgcgacgtccagttcaaactccaagtggtcaatgtctgttttcagcaagtcataaaggtcgtcttccaattgcttggcgagcttatcgatcatcatacgcgtttcgcttaaagaaacttcaagattcgcattgcgctttggctgtgacgccaaaaacgcatgcttttccgtcagttcaacaattgaatcaaggctttgataataaaagcgttcaacctgataaaaacgctttggttcgttctttgtgatgctgtaaatttttctgacgatccgaagaatttctagattctgtttaatagtttgaatgtttttaactgcaaataaggcttttcttaaccgggcaattttcagcttagcttcccgcagattctgttttatataggcatattcccgccttgtaagctggttttcttttaaaaataaataggttccgtaccatttcccgccaagataaacggcaatccaggctccggctgcgtaagcggaggacagcagaaaagtctggttaaacgcgaagaagcttgtaaaccaaaggagcacggacaatgcacttgcagcagttgcacgaatcataaaatgaagaatcggtttcattacaccactactcctaattttttatgataaatcggtcgtttcattatactactctctaatacggatatcggctaagcaaagtttcagttcatggtgtatagcaaaaaagacactttaaccgtgtcttcaccacttttattataaccttcctcaataccgacttaaaggcttaaaaaaaagacctgaaacggtctaagaatataatggcggcgtacggagactctttaattttttgacataatcagagtattcggggtctgatgttgatgtagatacaatctttttctcacaatccgaacataaaaatttcgtataaagatgaattccttcggttttattttcctcgcaaatgatacacgtttccccatgattagacttactcatccattccacctccatgggtttcagtattcccaaagaacaatatttgtatacaaaattaagaaagtttttgaaggttagattagtatatgtagccgggaagtgttaggtgtttgtatcaatgaggttccaaatcattacaatcagtatatagtttaccactttatagaaagtacttggtgaatatatcctgttcaaccatgaaaatgaatcattgggcttaggtcattatttctattgattcatttcgattaccgtaaacaagtttgttgtagcattctttaggctctgtgactaaaccaaaaagccatttgttttaaattggtctttcggtatcacgaaaatttcgttttttgggctgatagaagttttgcaattatgaattgtatgttaatctttaacataaaaaggatgttagctggaagggaatgatggcagttggagactatcccgtcttcagaagttggaatcaaaataaaccgctggtacaacgaaattcaaaaattaaacgtaatagaagcagaacgattaaaggcggaagttcacttagctatagaaagaatggaagaagatcaggacttgctttcctattatcagcttatgaattttagacatgagttaatgttggaatatcttttcccggcagaaaaaaagctgagcaaatctgattatcttagggaaattgagggacagggaagaaaattgtcaggcttgctcgaatactatttttcctttttcaccggaatgtatcatttttctcgcggaaaatacataaaggcaatcaaggcatatagagcagcagaaaaaaagttgacgaaagtttcagataaaatagaaaaggctgaattctattataagatggcggaagtgttttatcatatgaaacagactcatatgtcaatgtattatgtgtctctcgcttatgatatttataaatcctatgatgcatatgtgattcgaagaattaattgtctattcgttgttgctgggaattacattgatttatcaacccatgatcaagctttaccgcatcttttaagcgctaaggaatccgcggaagacattcaaaacaaggcgatcgttgcaaaggctcttttaaatgtagcatattgttataatgcaatggagagaccaacaaaagctattgaatactttcataaggcgattgatgtagcaaaggaaataaaggcaaaagaactgactcaggcttattatgatttggcattaattcactttcgaaataacgaaaatattgaaggacgaaaattttatgaaaaggcgcttgaaagtgcgcgggtatttgaagatgaattattcctgtgtctgttggatgttttagaggcactgtttataaaatcagctaataagtcagaggtactagaaacaatgaaaccattacgggatagtcgtggttacccctatcttgaggaactggcattagaagcagctctattctatactaggaatgagcggccaaatgattccatatttttttatgatcagatggtgcaggctcagaaacaaatcaaaaggggcgactttctgtatgaaatctaagctgtttctttcgctgacccttgctttgggcttgttggtcgtgtcgagcgcttccattcacacatctgttgaacaacaacatgcagaattttctgtagcatctaggctcgcaacataattgtgtttgggcaggtcatgtgatggcctgcctttttggtgaaagaattattttagtttgaaaaccagaacgattgtgttaatactcatctttcttcgtcccttgtgttggaattttcatcatatcaatatttgaatatgcggctgtccgcattattaacaattttaaattttttgcacaaattttatacaaaggcagacaaaaaccttgatatatcaatggttctatgggtatattcaaccacgaccaccgatatcgctaaaaaccgtattgccaaacgacgaaagagcgttccttacacaaggaatgctctttttgtttattcctcatcaaagcggagagccgccaacataaacgcaatgaccaactgttgtccgcactctcactcttcattcagcgcaccgtgaaatgatgcataccgttcaaacagttgtcccttcattgaagtccattcaatcaagatcacactcagtaagtcagtaagaatgaagcaccttgtcatcgacaaggtgcttttctttataccaatgatgtgttccgatcctccgaccgcctttttacgttttgtttacaagttgatcaaactttagcgacatctgcccgctatattgaatacagcatggcttcacctaaatataggaaaaggattaatttttttttgaggaggaatacagttgtcaattcgcattaaactgcctgacgggtccgtcagagaatttgaggaggaagcaagtattgaagatgttgctgcttccattagctgcggtctggaacatgcggttgcaggtaaattaaacggaaagcttgtagatttatcaactccgcttcaggacggtgcactcgttgaaattgtcacccgggactcagcagaaggacagaagatcgtgcgtgaaaaatcgcgggggaaagggcgtattgtggcacttgacgcagcacggggactggcggtcatcgggatgtatttgcagcacttcgccttgaacgaaacgaacggttcgatcgtttccgggaatacgacgcttctatttgtgctttgcggcggaatctcctattcgatcatggccgggcgcatgatggacagaggaatggagccggccgcatttcggacgcggatgcttgcccgcgcggtatttatcgatatgataggatatctgctcatcatgctgaatactccgttcggggtgattttgccggcttatgctgcactttttgtgctggcattggtgctgattcgccgttcgacgcgtgtgctcgttacaacagcagctgttttgcttgcggtgagcccgccgctgatgattctcggagggagcgtcctgtcgggagcaaacttgcttggcgatattgcaggcggcccgatgtcggcgctcgcacttgcacccgctttcgtcgccggtatggcaatcgggcgctttgatctgaccaggatgcgtacggcactttcgctagtaagcagcggcgcagtcatgcttatcgtctctaagttattgggcgttttcgttcttccttggctgagccgttccttcgaagaatggctcgtaagtgttcaaggcaccgccggcgccgagccggatcagtatgcaatctggccgcacaacgtggcaccgccgctttggcacaatcttctttcgatagctccgcacagtgcgtcaactttccagacgatgctggggcttggggctgcctttctggttctaggaatggtatgtctcgtgccgcagaagatttctgcagtgctaaagccgttcgcgggagtcggacgtgtagcgttgacgatgtatgcagctcagtttgttgtcatatgggctcttgaaatctcgggggccaagtatgatatcggggcaattccattcggtgatctgttcgtcgcggccgtggcgacggtgacagggtggctgattgcacggcttcctaccggtccgctcgagacagcgatgcgacgctttgaccgggcattcagcaatttgggacccgtcacgggaccggcgagactgagataggcggtcttcaacatgttgcctgaaggaaccgagaggcagctccttcaggattttagcctgtcgagaggaatatgcagtggatgagttcatgctgaaccagagtccgaggaaacttgtataaccaaaagttctacaggcctttgtttatctataaatgaaatccagctaagacccctcacccttgtatcgtcttttctcttattacaatttgaaaatattaagaaatggggatgtgtttaagaaatcgtgcacaaagtgttatctgatgtcggttttatcgcttatgatgctgccaaagggaagattatggccttcacgtataaagatcacaacaagaacttaactgttttcgctaacgatttaaccaatgacgatcatccgcagcatcaatatcggttgctggctaattcgattttcaatgccgctcccggaaaaactgacaatgctctatcatcaaaacggtgagaggttggaaagctaaagttcaaacggctcgcaggaggcgtctcgtccaaggcgtcggaagcagaactgaagcatgttatcgttagtaaagaaatgttcagtcgcatcacgcattaaatagcaaggctctaaaaactgcccttgatccgaagggcagttttttcttggtctatggcagcatcgtcctttcttccagttagaaagcttccgattggcgggcctctatgttatagctattgaaggtcagcatacttgtgcaataaaatgaagagcggagaatatgcagtggttcgcataaaaaattttacttgcacgaacagttgacattcagtagtcacagtgatttgataaaggaaattcgaatacagaaagacgggagctgaaacattgaagaaactggtgaaggtcagaggaattacattgggtgaaggccggccaaaaatctgtgtgccgcttgtcggaaaaaaccttgcccaattaaaagaagaagcggcttattttcaaacgcttgatgccgatattgcggagtggcgtgctgatttttatgaagatgtagatgacgttgatcaagtctgcgcggcattggcggaaatccgcggccttttaaaggacactccgctcattttcactttccgcagcgccgccgaaggcggagaaaaagagatcagcacagcgcgatatttttctttaaatgaagcggttgttaaaacagggcttgccgatgtgattgatatcgagctgttcaatgacgaagagcaagtgaaagcgctggtggaaacagcacatggtcatgaagtgtccgtgattatatctaatcatgattttgaaaagacaccagctgcagaagaaattgtttcccgtttgcgaaaagcacaggaattaggggctgatctgcctaaaatcgcggtgatgccggaaaccacggctgatgtcttgcgtctgcttgaagccacttgtacgatgaatgagaagtatgcagatcggccgattattacgatgtcaatggccggcaaaggtatcatcagccgcctggcgggcgaggtattcggttcagcaatgacgttcggtgccgcaaagaaagcttcagcaccggggcagattgcagctggtgagctcaaggaaatccttcatatattgcatcgcaatttataacttgatgattgagaggagcctggctgacagccggctcctttgtcagttttttcgtagtcctaacgactcatttatctttcttttcggaatcgttttaactttcccttttcattcataatgggttgtgatacgataatcacgagaaatttaatagcattactaggggtgcccgaatgcgggctgagagagagacatgcgtttcttaaccctttggacctgatctggttcgtaccagcgtggggaagtaaaaaggattcgagagaagatggggaatgggtatggtccgtctgtcttctagcgattttactgactgtaaaaccaggttcatcatatgagcctggttttttgtgctggtgctgttccggagtttcgtcctgatcaattttttagaggggaaggatttttacatgaaacaggaatcagtacagcaaaaaaacatctcgataatgtcaagtttttcagggagccgcaaagtgtatgtcgaagggtcgcgtcctgacattcaagtgccgatgagagaaatttcgttaagtccgacgacgggttcgtttggcgacgaagaaaaccagcctgtccgcgtctacgacacgagcggtccctatacggacgccaatgcggacgttgatattcttaaggggctgaaacctttgcgggcgacctggatcagggagcgcggcgataccgaagaatatgaaggcagagaaataagaccggaggataacggctataaaggcaaagagaaagcgagccacagctatacagggttgaaacgaaaaccgctgcgcgcgaaaaaaggacaaaatgtcactcagctgcattacgcaagaaaggggatcattacgcccgagatggaatttattgcgatcagagagcacgtatctcccgaatttgttcgtgatgaagtggcaagcggacgggcgattattccgtcaaacatcaaccatccggaaagcgaaccgatgattatcggccgcaacttccacgtcaaaatcaatgccaacatcggcaattccgctgtcacctcttcgattgaagaagaagtggaaaaaatgacatgggccatccgctggggcgctgatacgatgatggacttgtccacaggtaaagatattcatacaacgagagaatggatcatccgcaactgtccggtgcctgtgggaacagtcccgatttatcaggcgcttgaaaaagtaaacggcgtcgcggaagatcttacttgggacatttaccgcgatacattgatcgaacaggctgagcaaggcgttgattatttcacgattcacgccggcgtccttctccggtatgtgccgttaacagcaaagcgcgtcaccggaatcgtatcccgcggcggggcgatcatggcgcaatggtgtttggctcatcatgaggaaagctttctgtacacccattttgaagagatatgcgagattatgaaaacatacgatatcgcattttcgctcggagacggtcttcgtcccggctcgattgccgatgcgaatgatgaggcccaatttgccgaattggagacgctcggcgagctgacggaaatcgcctggaagcatgatgttcaagtaatgatcgaaggcccgggacacgtgccgatgcataaaatcaaagagaatgtcgacaagcagatggagatttgcaaagaggcaccgttttacacgctcggtccgctgacgaccgatattgcaccgggctacgaccatattacatcggcgatcggagcggcgatgatcggctggtacggaacggccatgctttgctatgtgacgccgaaggagcatttgggactgccgaacaaagatgatgtccgcgaaggcgtcataacatacaaaatcgcggcccatgcggctgaccttgcaaaagggcaccccggcgcgcaaatccgcgatgacgcgctttcaaaggcgcgctttgaattccgctggcgggatcagttcaacttgtcgctcgatccggaaagagcgctcgaataccatgatgaaacccttccggcggaaggcgccaaaacggcacacttttgttcaatgtgcgggcctaaattttgcagcatgaggatttcccaggatattcgcgactacgccaaggaaaacaaccttgatgaagaaaaggctatccaaaaaggattggaagagaaggcgaaggaatttaaaaaagcaggcggcagcatttacagttaaaagcgggcaatacagcagatgaaaggggaacctttcatctgtttttttataatatagggttgacaggtcggaataatatgaattagtatgttatttaatatttcggaaaattccatcagcgctgatcggtcaaccgaaggctcttatctcaattgggataagagctttttattttcagttttagaaaagaaaggagaacaagatgtctttatcaattcgtgtgaatgaaaaagcatttggaaaaggcagctttaaaacaagcgtgctccaagacgtgaatcttacggtcgaaaacggcgaatttttgactgtcatcggtccgagcgggtgcggaaaaagtacgctcttaaaaatcgctgccggtcttgacggggattatgaaggacgaatcagcatgaacggaagagaaatcaagggcccggggattcagcaaggcttcatctttcaggagcatcggctttttccatggatgacggttgagcaaaatatcgccgcagatttaagcctgaaagaaccagcagtgcgaaaaaaagtcgatgaattgattgaaacggtacggctgaaaggtgcggagaaacagtacccgcgcgagctgtccggcggaatgtcgcagcgggtcgcgattgccagggctttgctcagggagcctgagattttgctgcttgatgaacccttcggtgccttggacgcctttacgagaaagcatctgcaggatgtactgacagacatttggagagaaaagaagatgacgatgatcctcgtgacgcacgatattgacgaatcggtgtatttagccaaccggatcgcaattcttacggcaaagccggggagaatccacaagctgattccggtcgatctgccttttccgcgcagcagaacatcgcccgtttttcaaacaattagacaaaaggtgctgaaagagttcgagacaacggaaacattcagctttcaggaaggttcaggaatttgagcagaaaggagcggaaaaacgtgaaaaaatggccgttgtatgtgctgggctgcctgttgcttcttgcgggctgttcagcagccaaatcaagtgaagggggcggagatttaaaagagatcaacatcggagtgcagcaaagcttaagcccgttgctccttgcgaaagaaaaaggctggtttgaaaaagagttcgcaaaagaaggaattaaagtgaaatggacagagtttcaaagcggtccgccgcagtttgaaggtcttgccgcggataaactcgatttttcccaagtcggaaattcaccggtgatcgcagggcaggcggctggcattgattttaaagaaatcggcctttctcaagacggtttaaaggcgaacggcattcttgtgaaaaaagggagcggaatcgatgacataaaagatttgaaaggaaagaaggtggcggtggcaaaaggcagcagcgggttcgatttcctgtataaagtgatcgataaagcgggtctgaagccaacagacgtcaacatcattcagcttcagcctgacgaagccatgccggcatttgacagcggagcgattgacgcctggtcgatttgggagccgtttttgtctcttaaaacgatcaaaagtgacgcggacatattggttgacggggaacaaatcgacaagtattccccgggttttacgcttgtacgaagcaaattcgccgaacagcatccggatgaggtgattcgttttctgaaggtgtatgacaaggccgtgaaatggcagaaaacccataagaaagaagcggttgaagcgtacgcaaaaattaaaaacctcgacaaagaggtcgttgaaaacgtgctgaataacaccgaaccgttaaatgagccgatcacagaccgcatcattcaaacacagcaggagaccgccgattttcaatacaaattaaaagcgattaacaaagagattgatgtaaaagaagtggtcgacaattcatttataaaaaaagcgctgaaagaaggagatgacaaatgagagctgtttcatcaagcaccccctcgatccagccgaaaacaggcgcaaaactgagaccggccgcttttcggctggcatgggggaagggatttgtattacccgtcatgttgattttattatggcagcttgtcgggtcattggagctcatatcaaaaaccgtgcttccggctcctttagatatattgcttacatttcgggatcttatcgtatcaggagagcttttcactcatttaggcatcagcattcagcgcgccgcgctcggctttttcctgggggccgggctcgggctcctgctggggcttgtaatcgggttttcgaaaattgccgaggattacctcgatccttctctgcaaatgctgagaaccgttccgcatctcgccgtcacgccgctgtttatcttatggttcggtttcgatgagctgtcaaaggtgctcttgatcgctcttggggctttcttcccggtatatatcaacacattttcagggatcaggggcgtcgattcgaaactgttcgatgtggcgagggtattggagttccattggctgaagcaggtgacaaagctcattcttcctgcatcgctcccgaacattctcttaggcatccgcctgtcgctcggcgtatcgtggctgggccttgttgttgccgagctgatgggatcaagcgctggagtcggctatatgattatggatgccagacagttttcgcaaaccgataaggtgtttgtcgggattttgatttttgccgccgtcggcaagctgacggattcattcgtcagaattctggaaaaaaagtgccttggctggagaaacagctatcaaggaaacaaaaagtaaaggggagatctttttggacattttatggtttattccgactcatggcgacggacgttatcttggtacaaacacgggaggaagagccgcagatcacacctactttcagcaggtggcgcaggcggctgacaggcttgggtatacaggggttcttcttccgacgggaagatcgtgcgaagacccgtggattaccgcagccgctctggcgtcagtcacgaaaaatctgaagtttttggtcgctgtaagacccggtttgatgcagccgtcggttgcggcgcggatggcttcgacattcgatcgtcttgcagagggcaggcttctcatcaatgtggtcgccggcggtgatccgtatgaattagccggcgacggcctgtttatcagccatgatgaacggtatgaagcgacaaatgagtttctcgacatatggcggtcgcttttaaaaggcgagaccgtcagctactcagggaaacacctgaagactgaaaacgggcgcttgcttttcccgcccgcccaacagcctcatccgccaatctattttggcggctcgtcaaaggccgggcaggagactgccgccaaacacgcggacgtctatttgacatggggagagccgcctcatctcgtcaaagaaaaaatccaatctgtcaaaaagaaggctgaaaaagaagggagaaccgtccgttttggaatcaggctgcacgtgatcgtcagggaaacggaaaaagaggcctggcaggcggcggatagactgatcagccgcttggaggatgaaacgattgccgcagcccaaaacgcgatgaaacggatggattcatcaggacaaaagaggatggttcagcttcaccagggaaacagaagcaatcttgagatcagcccgaatctttgggcggggatcggactggtcagaggcggagcgggaacagcgctcgtcggtgatccggaaacggtagccagccgaataaaagaatacgccgacatcggcattgagtcctttatcttctcaggttatccacatcttgaagaagcgtaccattttgcagaaaaggtttttccgctccttccgtttcgaacgaaacttcaaagtaaagcatcaggcgaagtcatcggaaatgaccattttccgtcgaggcaaaaagaaaaaaccgtttaaataaaaaaactccagacattctggagttttttatctgtttttataaaatgaaaacatatatgaaagatgctgaataatgatcagcataaagatgacgataatcggaaaagacggaatcctgacttggaaaaacggataaaagatcaataaaagcgctgcgaccggcatcgccacatacagcacgatatatgatgttctgcatgcttttgcggtaatcatctgctctctttcatcctgctctttaaattcgtcggggacgagcataaagcgctgcttgcgtgaaccgctttttttctccaagtatgtgtaaatcgaaaggacgagcccaaagagaaggatgggaatcagattaaacacaaaatgaagctctgaatcgtttgttttcaggcttttggcaatttgttccgatgtgtggaaaaaggttataaacgtccagcatgcgagtccgaacagaaggatgtgaaagaaagtccgtgttatcatattcattcgtttttgtccccctctagccaaaatacgtcttccatttttaattgaaattccttgcaaattttcaaagccaaaagaagcgacggtatgtaattgcctttttcaatggccgcaaccgtctgccttgtaaccccgatcgcctttgcaagggcttcctgtgaatacccgtatcttgctctcaattctcttaccctgttgttcatcctaccacctgcaattcttcgtttatatagtatatttgacatattgttaaatagatttgacataatgttaacttgtttttacaatgtaatcaatatcttttgatctaggatcggcaggtttgtaacggcaacatttaaatttatacataaaaataacagaaatggaatagataaaatagaatcatctcgtttttttaaaaaaaggactttgagggtattttggcttctggattccgggagaagaaagggcttattatccagttcttttttctcgaactccttgtatggcgcgagatttataaagagaaaaaataagagaaaaagaaggcgggaaaataagacaaatagattatacaggcttcgtaaaatggaaacggggcttaaattttctcattcaagccgaaaagggtgggacattagattgaaaaaccaagagatccttaaataaatagttggaacgtagtgtttatgaaataggaaatttcatagatttcagtatgattttggatatgttactctttggttacttgatagaaaggagggggaaaaatgacatacgcagcacctcaggttgactattctgtcaatccgtcgatcgaagatcaggcttggttcttggtgtttgttgcagtgcttttggcacttggagcaactgttgttcttggcgccgctgtatggtgtgtggctaacggaaacggcagcttcacgggatccgtcaaatgggtcagcggtttgcaggtcagcatcgaatgtaggaaatagccatacttaagtatctgttcacaacaacaagacatatttgatgaggcttaaccgtctgtggggggcggttaagcttttcctgacattaatcataccctggaggcattatgtttataatagatcatctgtctaaaacatataaaaacaatgtgactgccgttagcgggtttcatataaaaatcgaaaaaaaccagatcgtcgcgatagcgggtccgaacggttcagggaagacgacgatcattaactccattttaggaatcatcacgcctaccgaaggaaccattctgttggatgacctgccgaacacgacggcggaattcaagcagaaattcgcctacgttcccgatgaactccttttgccggacgccctttcagccgcagaatatttggattttgtatcttctatgtatcattgtacatcaaatgaaaaacggaaacaattaatcgagcttttcgatatgaaagaggctttgcaggagccgattgaaacgtactcgcacggaatgaaaaaaaagacgcagctgatcgccgcttttatgctggagagcgaatttgtcattatggatgagccgtttcgcgggctcgatatagaagcggtcatcaatacgaaaaagctgatgaagcgctatgcggccacgcaagggtcgatactgctggccacccatgacatgctttctgcggaagaactgtgcgataagatagcaattctatcaaaaggcgtcaaaatggatgaaggaaaagtgaaagaattgaaggctaaatataacagcgattcacttgaagaagtattcttaaaagcttcgatgctgagtgataggggtgctcattttgatcaaatcattcgaaatttctaaaatgatgctgaaaatgtggcagaaggaaatgggcaagctctttaataccggtacaaaaaaagcgatcgccgtgctttttttgcttttggcggtaacgatgggaagcatcatcggctacagttttacaggcatgtttttaagcgcgtttctgaacggcgaagttcgttctctcggattgttcgtgatttccatgtttatgaacgcgtcgatttttacatttgttttcttcattttatttaaagtaaggacgccagagcagcacagcttttccatgcagctcagctggtttccgctgacggccttccagagaagcctcggatatttcatcccgtttgccggagcggtttcatttcttgtcctgtttatgattttcattctgctgattccgaactttgtcgccagcggtgttgggttttggtttgcttttgcgttttttgcacttctttttgtacagatcatctttttcttttcgcttctcaatcttgtctataacttggtgtatatgttgattttaaaattcggctttccgctgcaaaagtttttttcaatgtttgtccttgtcgtgttagccgtgttttacggaatcacatcattcgatcttggaaacattcagaacgcttattcgtcttttgattatcatttgacatattttgcagcgccgctgtttctcatgctgaacggtcaggcgtcggatgccggcgtcattccgattgtgctgatcttgacagcagcagtcacggcctcttttatgtcgctgaatgttgtgccgatcctcactgaaaaaaaatcatctaaactgttttcatttattaaaatcccgtcatcaaagccgctgtctttggcggtgaaagaaataaagtctcaagcccgaaatgaagaaaatattttaaacttcatttttttgcttttggctctatgctttttgaaattcaagtttcagtttggatttaccggtgagagctatttggttctgggaggcgtgacaggtatcatcgccttcaattcatttggcaacgatctgcggatgatgcagatgtataaggcgcttcatttaaaaacggcaacggtactgtggtcaaaatatctcgggctctgtatgctcggcctcattcagctctttttgttttccgtgctgacgtggactttcccggagagctttccggtctttttaaagacggttgctgtgatcttaaactcgattgcgatgttctatttagcgggcattatttttccgcttgaccgaaacaacccttatatggggatcttctctttcggaatgctcctgctctttttgattccgctgtttttcatcgtgaattatgcggttgataacgtcacgggcgaagcgctgctgtttttcataccgtgccttgaattactgctgatcctgcttttatacggaggatttaaatggaggtaccattatgatcattaatatgttgaaatcgctggccggaatcaaaaaaattccctatttcccagagcatgtgacactgaatcggaagcatatttcagatcatgatcttgatgctgattttcccattaatccgactgcttatcaaatgctgaaggaagtcgacgggaaaaaagacgagctggagattgccgaagctctcaaaggtgtgtttaatgtcagggaagaggtgctgcagaaagatttgcacgaattgctgacagggctcaaccgccgttatttgatcaattggaggtacggagagggcccgtcttttgcgggagtgctttatcaattcttcagccagtatcatatccgctacaaggagaggttttcaagccattctgattcgtttctgctgttgtacataaagtttctgcaagtgatttctaagaaaatcatcgtgttctggctcgtctttttgatgttgtcgcttgcagcgtacaccgttgttccggatggatcgatcgtcggcatcgcggcttatttttccgtcgtctatttcgggttgatcaccggaacggcgcttcatgaagtggtgcacggcatcgcgcaccggaaagctgccggcaggaacggcccgcaggggtttttagcggctgatatgatgtcagtcaaatttgtccgccctgtcatgtcgctgcatgataaaaggtcgatttggattacggcgttgggaccgcttgttccaggtgtgctcggaatagccggcgtgctgtttacggtcttttttcttaaggaaaacgcggtttccgtcggagtgctgctgttcttttccacctatgctttgcatatgatgtatctgcttccgtttatgggtgacggaaagtcgattatgaaacagctgatgatcagaggaattggaggtaaatcatcatgaatacaaactctttaaagcagggactaatctttgccagtttctcaagctttctcgcatttccgatgcttgcggctgcgcttttgttttatcaccttttttcaaatcaaacgagcaatgatatcttgtttaacagtttgtcgtttgtcatggagagcgaatcggctttttcattccaggtgaagccaaactttttcttcattatgatcgggctgtttatcggcatttttattataacggctgcgatttcatcaatttatcagaaaaaaaagggtgaatcttaaaagagcttgcttccctgaggcaggctttttttatttgcatcggcagtcaggttgtggtaaatttaaatcgtaatcattacgctttggaataaaggaggatactcagagtggccaagaaatcaaaaattgctaaagaaaaaaagcgccaaaagcttgttgaacaatatgcagaactcagaaaagaactaaaagaaaaaggcgattacagagctttgagcaagcttccgcgcgactcggcgccagcaaggctgcataaccgctgcgaagtgaccggaaggccgagaggatatatgagaaagtttaaaatgtcgcggatcgcgttcagagaattagcatataaaggccagattccaggtgtgaagaaatccagctggtaatctgtcaatgtccggaaaaaagctgccgatgttaaatcggcgtttttttttcgacaaatttttaatatacccttgacgaaattttaataaacgtgtaacataataaaagtcaaaacgatgatgttgtttttagtgatcatatgcgggtgtagtttagtggtaaaacctcagccttccaagctgatgtcgtgggttcgattcccatcacccgctccatacatactgtttataacgcagtgtttcgtttctcagattaaacgaagcattgcgttttttcatgtatgaaatcatcataaaaaacctgctcttttcaagaacaggtttttacggaaagacggctgaaatgtgcctgccgccgtgaatttgttcaaacatttttgtcaaagaatcgagcagccggctggcttcttctttagataatgacggcctgaaaaagacgagctgcaaggcatcttttgtgtccgctcctgcatgatgaagactgaggttttcggtgatcgtgccgaatgctcccgcatcatcggagaacgtgatgatctcgtccgggccgccgggttcgattttgatcggacccttcaaattccgggcgtcatatatatgaaccggaatcaaatatttgagagagaaaaaacggctcagatcaaccgccgaatttttcggctcgacaaagcgctgctctttgatgtcttccagcatccgttcgagtccgctttcccggcctgaaaaagacggattcagctccctgaaggcatcatgccattcttttacggccgattcatcttcgatactgcggtcggcatagtcaaaaaacagcgattcctgaaaaaggcggagccggcctttaagcatttgcggggagccgttgatctcaataccttgatataacacagcgccaaccttaaatgaaggaatgcggtttaaaatagcaggcgcaatttgcaaacgaagttccaattttaattcaactcccgtgtcatggtacactctattatacagagagcgaaaacgaaaacaaagaaaggaggctctgcgcgatggatgtgaaaaaactgaaacaggatgtcatcgaattcgcacagcaaatcggcattgataaaatccggttcgccagtgcagatacatttgaaacattaaaagaacgattgattgagaaccgggcccttggctatgaatcaggctttgaagaacccgatcttgaaaaacggacgaacccggatctgcttttgccgaaggcgaagtcgattatcgccatcgcccttgcatacccctcaaaaatgaaagacgcgccgagaagcaagaaaggcgaacgaaggggcatcttttgcagagcttcctggggaaaggattatcatcatgtcctgcgcgaaaagcttgatcagcttgaagaatttttgaaagcacagcgaagcgatgtcagaacgaagtcgatggtggacaccggtgagctttcagacagagctgtcgcagagcgtgcgggcatcggctggagcggaaagaactgcatgatcattacgcctgaattcggatcttacgtttacttggcggaaatgattacgaatattccctttgagcctgatgagaggatcgaagaccaatgcggctcatgcaacaagtgcatcgaggcatgcccgaccggcgcgctcgtcaagcctgggcagctcaactcccagcgctgcatcgcttttcagacgcagacaaagggttttctgcctgacgagttccgtacgaaaatcggaaacaggatctacggctgtgatacgtgccagatggtatgcccgaaaaataaaggggtcgattttcatctgcatcctgaaatggagccggaccctgagattgccaagccgcttttaaagccgcttctgacgatgtcgaatcgcgaattcaaagaaaagttcggccacgtggccggctcatggagaggcaaaaagccgattcagagaaatgcgattatcgcacttgcccattttaaagaaacggacgctctccctgaactgattgagctgatgcacaaagatccgcggccggtcatcaggggaaccgccgcatgggctgtcggaaagatcggcggagcggatgtgatgagtgaattggagcgcgcgctcgcgcacgagcaggatgaagacgcaaaagctgaaattcaaaaaggcatcggcctgttaaaagaaacgagtgcgactaattgagggctgtcctgacatatgtttaatgatgagaaacgaattaacaaacatatggtggtgtagcccttgaaacagatcatcgagcagctcctgaaagccagacttcaatacttaattaacggcaatgatgaaacaaactggcgggatgccggaggttttgaagtcattgaacggaagcggaggctttttcaaaaacgcggcgtgcatatcgtgaaggccaatatagaagcggctgtaaaagagcattggcttgatgaagacggcgcgtcacatgtgaactatcaaacccataccgcatatttgtgcaaagacggggatgatatgtatatggaagaacatatggaagacagaaacgcccttttgtatgatcagatggtcattaaagactccgaggccctgcgtccggccgcacagtctcatcctgagcctgaaaacggcgatgaagatatgcgcgaattgctgggaagggcgttccgctatgaccggcttgccgcggtgcgctatgctgaaacgtattggaataaacgaaatcctgcttataaaaactttgaagacaattgcacaaactttatttcccagtgcataagggccggagatgcgccgatgcgcggctatccgaacagaggcaagggctggtggatgcaaaaccattcctggagctacagctggactgtcgctcattcgctcagaacctttttgaagcattcaaaagccggtctccgagcggttcaaaagccggctgcgaaagagctgatcgaaggcgatgtcatctgctatgattttaacggagacggcagatttgaccacgtggcccttgtgacagcgaaggataaaagcaatatgccgctggtgaacgcgcaaacgcacgactgccggatgaggtactggtcttacgaagattcgcctgcttatacttcatcgattcgatatgcgttttttcatatatcagatgatacgacaaaatcgaaatgagtggtataataaacagcggattagaaaaacagaggtgaatactttggcattgcatgtcgtactatatcaaccagaaattcctgcaaacacaggaaatatcgcacggacttgtgcagcaacagatacaacacttcatttaatcagaccgctcggcttttcaaccgacgataaaatgctcaagcgggcaggtcttgattattgggaattcgtcaatgtcgtctaccacgactcattggatgaattgtttgatgcccatcctgaaggccgttttttcttcattacaaagttcggtcaaaaaccgcacacttcatttgattattcagatcaaaacgaagattacttctttgtcttcggcagagagacgaacggcttgccgaaagagctgatcgaacaaaacatggatcgctgtctgcgcctgccgatgacagagcacgtcagatcactgaacttatcaaacactgcggcaatcctcgtgtatgaggcgcttcgccagcagaattacagagatttgacttaataggtaaagagccctttttcaaaaggggctctttttttgttttccaatgtaacagtgttatgttacaatgtgtgtgaaggagctgaaacagatggttcaggatgatttaatttcaaaaaaagagctgctggatttgacttcgatctcgtacggacagctctatagatggaaacggaaaaatttaatacctgaagagtggtttatccggaagtctacgttcaccggacaagaaacgttttttccgagggaagacattttaaaaagaattgaaaccattcaaagcatgaaagaaaacctttcccttgatgagatggcggaaatgttttcgcccgatttgaccgaactaaacgcgagccgcggggagctgctaaaaaaaggcatcgtttcagaagcggtcatggcgttttttgaagaatgcaccggaaaacgcgatcatccatttaatttgacagaagcacttgcggcttatgtgctggaaggcttgcttcaatccggcgacatcagcctggatgaagggaaaatggtgctggatgtcatcatgtcgaacgaggcggaaaacaagggaaggctgcttgtgctccggaagctcggcgttgcaacatgtctgattgccgagggcagcattgtgttggaaaagggagtcaaggtagccgctgacatcaatctggcggcgagcagtgaagaattgaaaacaaaattcatgtaattggaggatcaaagatggagaatttattgataaacggattcggcagttcaggcggaggcgcgtatcaaacggttgagttaaacggcaaaggtacgattaacggcgatattgactgcgaaaggttcagctgcagcggcaccgggactgtaaacggagacgtaaaagcggatgagctgagaatcagcggccatgcaaaactaaacggcgccatcgaggcttcaaaggttagaattgatggttctgcaaaagtggatggcgatgtcgaagcagaaaagcttaaaatcttaggctacgccggcattagcggacatgtgaaaggcgacgaagcgatcgttcgcggaaaaacgtcgatcggcaaagactgccaagtggaacatttttctgcagaaggctattttacaatcgacgggctgttaaacgcggagcaaatcgaaattaaggttcacggcggcgaaagtaaagtgaaagaaatcggctgccggaggatcgtctgcactgcacatcaatcgaagctgttctcgtttttatcggagcttatttctcctccgaggctgtctgccgagctgattgaaggggatcatatcgaacttgccaatacgaccgcaaaagttgtccgcggcaattcggttatcatcggcgaaaattgcgacatcggcctgattgagtataaggaagatatccgggtggccgaaacggcaaaagtcggagagaaaaggaaattatagcggagggataggacatgaagaaacacgacttgaaaatacacggatccggaagcgcggggggcggatcattccatcgtgttctcattagaggtgaaggaatgatcacgggaaacattgattgcgaaaaattcagtacacacggtacaagcgaactgtcaggcgacgcgaaaattaaaagctttagtgtacacggggaaacagagatccgggggaggctgaaagctgacaaagccagagtatacggcacggcggatgtttctgagaacgccgagatcagcgatgcagccgtgaaaggcatcatcaatatcgggggaaatatgacggctgacacttgcgatgtcaaaggcgccctgaacgtaagaggcgattgcgaggcagaggattttaaactgacgggcagcctggatgtaaagggcctcctgaacgcaggtgtgattgacatcggcttaaagtacggaaacagttcgattggcgatatcggcggtacggatattaagatcgtcaataaacgcgggctgttgtttaatagaaacggaggtactctctcggcagggacgattgaaggagacgatatttacctggaaaacacggcggcccgaatggtcagaggaaaccgcgtgcatataggaccgggatgcaagattgagaaagttgaatacaagagcagctaccgggtatctccgaagtctgaggtaaatgaggatcaacagcaataaaacagtgttatgttgtgaaaaaagggatggctttaaaagtgagccatccttttttcttttttaattttactttccgggtttgctttcgtatccggcagtaaatatggatacgagaaacgcgaggatgacccccatcatgatcagcgttctcattaaaatccccctctcatccttgatcccttgttgtcatctgcaccgatgcggcgagccgttccgcaggagcacatgcggacggaacttttctgctcttattatgaatggtttgctccagccttgtcaattcgaggaaagtacatttcatttttcatatgaaaagcatctaaagggacatcttcgcatagagtgaatgtaacagtgattcacttggcaccttgcatttatcatcatataggaggttcttatggatatattaaaaaagattgaacagtatagagaggaagagcagcgtctgaaatgggaaggaaccttcgctgaatatctggaaatcgtaagagaaaatccgactgtcgcgcaatctgctcattcccgcgtttacaatatgattaaagacagcggcattgaagagaaagacggcaaaaaagtatacagcttctttgacaaagagctgtttggtcttgaagagcctttggaacgccttgttgaagaatactttcatccggccgcgaaacgccttgatgtcagaaaaagaatcctgcttttgatggggcctgtcagcggggggaaatcgactttggtcaccatgctgaaaagggggcttgaagcatactctcttacagatgaaggggctgtctatgcgattaagggctgcccaatgcatgaagatccgcttcatttaatccctcagcatctgcgggacgatttttacaatgaatacggcatccgcattcaaggaaacctgtccccgttgaacatgatgaggcttgaacaggaatacggcggaagaatagaagacgtgaaggttgaaagaatctttttttcagaggataaacggacggggatcggcacgttcagtccgtcagaccctaaatcgcaggatatcgccgatctgacgggaagcattgatttctcgacgattgccgaatacggatcggaatccgatccgcgcgcataccggttcgacggagaattaaacaaagcgaacagaggaatgatggaatttcaggaaatgctgaaatgcgatgaaaaattcctctggcaccttttatcgcttacacaggaagggaatttcaaagcgggccggttcgcgctcatctcagcggatgaattgatcgtagcccacacgaatgaaaccgaataccgttcatttatatccaataagaaaaacgaggcgctccattcgcggattatcgtcatgccgattccatataatttaaaagtatcggaagaggaaagaatttatgagaaaatgatcgctgaaagcgatgtgtctgatgttcatattgcgccgcacacgctaaaagtggccgcgatgttttcaattttgacaaggctgaaggagccgaagaggtcagacattgatctcgtcaaaaaaatgaggctgtatgacggagagagcgttgaaggatacaattcagtcgatgtcgaggatttgaaaaaagaatacactgatgaaggaatgagcggaatcgatccgcgttatgtcatcaaccggatctcgtcgacgatcatccgcaaaaatatggagtcgatcaatgcgctcgatgtcctccgttctttaaaagaaggactcggccagcatccgtcgatttcggcagaagaccgcgagcgctatttgaactttatttccgccgccagaaaagagtacgacgaaatggcgaagaaagaagtccaaaaagcgtttgtatactcttatgaggagtcggcgaaaacgctgatggacaattatcttgataatgtcgaagcgtactgcaataaaattaagctccgcgatccgctgacaggagaagagatgaatccggatgaaaagctgatgaggtcaatagaagaacaaatcggcatttccgaaaatgcgaaaaaggcattccgagaagaaattctcatccgcatttctgcctatgcaagaaaagggaagcgatttgattataattcccatgagcggctcagggaagcgattcagaaaaagctgtttgcagacttgaaagatgtcgtcaaaatcacgacgtcgacaaaaacgccggacgaacagcagctcaagaaaatcaacgaggtcgtcgcccgtctcattgatgagcacggctacaactcgacaagcgcaaacgacctcttaaaatatgtaggaagcttattaaaccggtagcttgaagacccgtccggagaagggcgggtccttttgtcccattttcaaaattgtttgtcaaaagttatttgcacctgcataagataacaataaacacttttagacttgcatccgcaggactttgacctataaaccgaagccatttaaggggattatcaataaggaggggaattcatgtcccataaagacaatggccattttattatttctcaggaagactggtccctccaccgaaaagggtatgatgaccaacagcgtcaccagaaaaaggtgcaggacgcgatcaaaaacaatctgcctgacctgattacagaagaaagcatcattatgtccaacggcaaagatattgtcaaaattccgattcgctcgttggatgagtataaaatccgctataactatgataaaaataaacatgccggccagggagacggcgacagccaagtaggagatatcgtcgcaagggacggctctgataagcggggcgccggcaaaggccagggagcgggcgatcaggccggtgaagattattatgaagcggaagtttcgttaatcgatttggaagaggcgctcttcagcgaaatggagctgccgaatttagaacagaaagagcgcgatgatatcgttgtcgaagatattgaattcaacgatatccgcaaaacgggtttgacgggcaacatcgataagaaaagaacgatgctcagcgcatttaagcgaaacgcaatgactggaaaaccgtcgttttatccgatctatcccgaagacttaaaatttaaaacgtggaatgactctgtaaagcctgaatcaaaagccgttgtgctcgccatgatggatacgagcggatcgatgggcgtttgggaaaaatatatggcgcgaagttttttcttttggatgacacgttttttacggacaaagtatgaaacggtcgatatcgagtttatcgcccatcatacagaggccaaagtggtatcagaagaagatttcttttcgaaaggggaaagcgggggaacaatttgttcatctgtataccgcaaatccctcgagctgatcgaagacaaataccatccgacacgctataacatttatccgtttcatttttcggacggcgataatctgacatccgacaacgcgcggtgcgtcaagcttgtcggagagattatggagaaagcgaatatattttgctacggcgaagtcaaccagtacaacagacattcaactttaatgtcagcctacaaaaatattaaaaatgaaaaattcaagtattatgtgctgaaacagaaagccgatgtttttcaggctctgaagagcttcttcaacaatgaagaacggcaccaatatacatgaaaaaacctgaattaaacctcgttgttttctttttttcgaataagcaattcagcgatataataagggaactttgactcgactatatgtaaaaactgttggatgatgacataatcatcgctggcactttgaagaagaaggtcataccaccattctgtttcatacctggcaatcatgcttaaattgtaagcaaccaagtaatgcaccaatatttccgggagctttaaaaagcgatcccgttcagccggaaaataatatgcgccatgttccaaatcataaagcaaggtagtcgaagtgctgggacggcattctttttgagcggcggaaaaaatgatcccctctttttcttcacggcagaaagaccagtttaaatggtattcgacatgttcgatgaaacgctttgacgacatattgtaagcatcgggcgtctcgcttggcagccaaatgagccggtcttcgacggctgcttttactattggattcggttttctttgaaatgccagtactttattgatctccggaattctcgccaaaagctgcttcatattgaatcgttcatcttccaatccggataattggaaaagggacctgatgacgtgcatacataggccgttcctttggatttttacttcatcttcataaaagcggtaattttgtttttttcgttttctagtggtcacgccatgggcgagcactgaagtatggcttggataggaaggatctgtcattaacaggcaggctttcaatagctgtgccatgccgtaaaataataaaatcggtttgatttccaacgtagcgattttggcttgcttgtaaaaggcttccgcatgtttaagaaaaaaaataaaccgctctccgtttttataggaattttttttggcatcttccattccttgatttttatataccatttcaagaaaatgctgggctgtttcgaccgaataaaatagctttaaatccttccatcctttatcttgcatggactccacttcccttatggttattttctaaaaattacaactgtttctcgctttcttgacagtgggtattcaagttgataatctacatataatattttgccgaaaagagggggatttactaatgtgggaaagcaaattttcaaaagaaggcttaacatttgatgatgtattgctcgttccggctaaatcggaggtacttccgcgcgacgtcgatttatcggtagagcttacaccgtctctcaagctgaatgttccaattattagtgcaggcatggatacagttacagaagctcaaatggccatcgcgatggcaaggcagggcggactgggtattatccacaaaaacatgtcaattgaacagcaggctgagcaggttgacaaagtcaaacgttcagagcgcggcgtcattacaaatccgtttttcctgacaccagagcaccaagtttttgatgcagagcatttgatgggcaaatacagaatttccggtgttccgattgttgacaatgaagaggatcagaagctggttggaatcattacaaaccgtgatctgcgatttatttctgattactccatgaaaatcagcgatgttatgacaaaagaagagcttgttacggctcctgttggtacaaccctggatgaagcagaaaaaattcttcaaaaatacaagatcgaaaaactccctcttttagatgatcaaggtgttttaaaagggctaattacgattaaagacattgaaaaagtaatcgaattcccgaattcagcgaaagatgttcacggccgcctattggttggagcagcggttggtgtaacaggcgacacaatgacacgcgtcagaaagcttgtggaagccaatgtcgatgtgatcgtcgttgataccgcgcacggccattcacaaggagtattggataccgttaagaaaattcgcgacacttatcctgaattaaatatcattgccggtaacgtcgcaactgccgaaggaacaaaagcgcttatcgaagctggagcaaatgtagttaaagtcggtatcggaccggggtcaatttgtacaacccgcgtagtagccggtgtcggtgttccgcaagtgacagcgatttacgattgtgcgactgaagcaagaaaacacggcgctgcgattattgcagacggcggcatcaagtattccggagatattgtcaaagccttggctgccggcggtcatgccgtcatgctaggaagccttcttgccggaacatctgaaagcccgggcgagactgaaatctatcaaggcagacgctttaaagtttatcgcggcatgggttctgtagctgcgatggaaaaaggaagcaaagaccgctacttccaagaggaaaacaaaaaattcgttcctgaaggcattgaaggccgtacgccttataaaggccctgttgctgataccgtttatcagcttgtcggcggcttgaaatccggcatgggctactgcggaacgaaagatttgcacgcattgagggaagatgcgcagttcatccgcatgacaggagcaggcctgcgggaaagccatcctcacgatgtgcaaattaccaaagaatcgcctaactataccatttcctaatcaaatatgacaaaaattaaaccgtagacagagtgatactctgtctatttttttttgcttcattatgataaaatttataatgttgtgtttgaaaaatgtcttaaaaggctttgatatagattattagtctgatgaaaagcggaggtatcacgatttgaaaagcaagagattaaagcagctgatcatgttaatcgttgcttttgccgtgactgtaggtgcattttctcctatgtcaactgcaaaagctgcaaatgatccaatcaatgtagacgcgaaagcagcaatcctggtggaagcttcatcggggaaaattttgtacagtaaaaatgccgaccagcgtcttcctgttgccagcatggcaaaaatgatgacggagtatcttctgttggaagcgattcacgaaggcaaagtgaaatgggatcagaagtacacgcctgacgattatgtatacgagatttcccaagatcgttcactatccaatgttcctcttcgtaaagacggatcatacactgtaaaagagctttatcaggcgactgcaatttactctgcaaacgcggcggctattgcactttctgaaattgttgccggttctgaatcgaagtttgtagagttaatgaacaaaaaagccaaagagcttggaatgaaagatttcaaatttgtgaatgccacaggtttggaaaacaaggatcttcacggcaaacatccgagcggaacaaatgccaatgaagaaaatgaagtgtctgcgagagacatggcgctccttgccgatcatttagtgagcgattatccagagatcctcgatacggcgagcattgccaaaacgaagttcagaaaaggcacagacgatgaaatggatatgccgaactggaactttatgctgaaaggccttgttcagcaatatgaaggtgtggacgggctgaaaaccgggtcaaccgactcagccggatcatgctttacggctactgccgaaagaaacggcatgagagtgatttccgtcgttctgaatgcgaaaggcgaccttcatacggcgcgatttaaagaaacgaaaaaaatgctcgattatgcatttgaaaacttcactatgaaagagttttacgcaaaaggcgcacaagtgaaaggcaacgaaacagtcacagtcgacaaagggaaagaaactgaagtcggcatcgtcacagaaaaagccttttcaatgcctgtgaagaacggtgaagaaaagaattacaaagcgaaagtgacgctgaacaaagacgagctgaccgcacctgttaaaaaaggtgagaaagtcggtaccttgacggcctcctataagggagaagaaaaggactacggatttctcggcagcgatgtatcaggtgtaaacctggtgacaaaagaagatgatgagaaagcaaactggtttattttaacgatgagaagcatcggcggcttttttgccggtatatggaacagcattgttgaaatggtaaccggctggttttaaaaaataaagagctctatttgatagggctctttattgtcatattcagatagaattaccatttacaatcctaacgatttgttattaaaatagaaataatcttcgtgtttttcatatgattttgtggaattataggatacaataggattaaatctgacaattcaatctttgattagggggatccttgaaatggctcaaacaggtactgatcgcgtaaaacgcggtatggcagaaatgcagaagggcggcgtcattatggacgttgtcaatgctgaacaagcaaaaatcgcagaagaagcaggagccgtcgcagtcatggcgctggagcgcgttccggctgatatccgtgcggcaggcggagttgcccgcatggcagatccgactattgtcgaagaagtgatgaacgctgtttcaatcccggttatggcaaaagcacgcatcgggcatatcgttgaagcgcgtgttcttgaagcgcttggcgttgactatattgatgaaagtgaagttttgactcctgcagatgaagaatttcatttaaataaaaacgaatttaccgttccatttgtatgcggatgccgcgacctaggagaagcgacgcgccggatcgctgaaggagcttcaatgcttcgtacaaaaggcgaacctggtacgggcaatattgtggaagctgtccgccatatgagaaaggtgaatgctcaagtgcgcaaagtagtcggcatgagcgatgacgaactgatgacagaagcgaaaaacctcggcgctccttatgagctgctgaaggaaattaaagccgaaggacgccttccggttgtcaactttgctgccggcggtgtagcaacacctgctgatgctgctctaatgatgcagcttggcgctgacggcgtattcgtagggtccggtattttcaaatccgacaaccctgcaaaattcgcgaaagcaatcgtagaagcgacgacgcatttcacggattacaagctgattgccgagctttcaaaagagcttggaactgcgatgaaagggattgaaatctcaaatctgctgccagaacagcgtatgcaagagcgcggctggtaaacacgaaggagacggattgacatgctgacaattggtgtacttggacttcagggagcagtaagagaacacattcgctcaattgaagcatgcggagcggccggaaaagtcatcaagtggccggaagagttaaaggaaatcgacggtttgattttgccaggaggcgaaagcacgacgatgaggcgcctcatcgatacgtatcagtttatgaagcctcttcaggaatttgccgcatccggaaagccggtatttggaacttgtgctgggctgattatcctggcgaagaacattgccggaactaacgatgcccatctcggggttctggatgtaacggtagagcggaattcctttggaagacaggtggacagctttgaagcagacttaaccgttaaaggacttgagggaccgtttacaggcgtatttatccgcgctccgcacattttggaagcgggcgcagatgtagaagtgctttcggaacacaacggaagaatcgtcgctgccaaacaaggaaatcttctcggctgttctttccaccctgagctgacggatgatcacagaatgacgaaattatttgtcgagatggtggaaaagcataaacgggaagccgtcgtataaaacggttgaaagctgttaaaacttgtagtacatttataagacaatatagatcgaaaagcgttgataggaagcagtaggaagcctctctttccaagagagccgatggttggtgcgaatcggcgaaagatgctgtccgaatccatccttgagcgaaatgctgaacagtcaaagtaggcatttacgggagaaccgttatcaaaataagcggaaagcaggaggtagacgcctgttttcaatcagggtggcaacgcgagagctctcgtcccttttatttaggggacaagggctctttttttcggtcaaatcagtataaaaggagcgaggcagatgcttgatgtcaaactgctgcgggcaaattttgaagaaatcaaacaaaagcttgcccacaggggagaagatttatcagattttgatcaatttgaggaattggatacaaagagaagagaattgatcgtcaaagtggaagagctgaaagggaagcgcaatgaggtatctcagcaggttgccgctttaaagcgcgagaaaaaagatgctgaccacctcattaaagaaatgcgcgaagtcggtgaagacattaaaaaacttgatgaagagctgagaacggtcgagtcttcgcttgataaaatcatgctgtctatcccgaacatcccccacgagtctgttccggtcggtgagactgaagacgacaacgtggaagttcgcaaatggggcgaactccctgagttttcgtttgagccgaagcctcattgggatattgccgatcaattggatattctcgattttgaacgggccggcaaggtaacgggaagccgtttcgttttctataaagggctcggcgccagacttgaacgcgcattgtataactttatgcttgatctccacgtagacgagtacggctatacggaagtcatcccgccgtacatggtgaaccgcgcaagcatgacaggcaccggacagctgccgaagtttgaggaagatgcttttaagatcagggaagaagattatttcttaattccgacggcggaagtgccgattacgaacctgcatcgcgatgaaattttgtcagctgacgagctgccgatcaattatgcggcgttcagtgcgtgcttccgttcagaagcaggctctgccggacgtgatacgcgcggtttgattcgccagcaccaatttaacaaggttgaactggtgaaatttgtgaagcctgaggattcatatgaagagcttgaaaaactgacaaatcaagcggagaaggttcttcagctgcttgagcttccttatcgggtgatgagcatgtgtacgggcgatctggggtttaccgctgcgaaaaaatacgatattgaagtatggattccaagccaaaacacatatcgcgaaatttcatcatgcagcaactttgaagctttccaggccagacgggcgaatatcagattcagaagggaagcaaaaggcaagccagagcatgtccatacgctaaacggatccggcttggcagtcggcagaacggttgccgcattattggaaaattatcagcaggaggacggaagcgtcatcatccctaaagcgcttcgtccatacatggggaacagagacgttattcaaccataaaaaagtgcgcgccaataggcgcgctttttttattcgagtgaccagacggcggctacatttcgcgcacagcgcgtaagatttgaacttccatcggcaagagcgttctccaaggagctgatgccgggcacgatcgaaaagagagcggaaatgccgatatcataaacaagctcgcagccttcaccgagcgatccggcaaatgcaataaccggaatattttcgctgcaggcgcgttttgcgacgccggccggcgtttttccgctgaccgtttggccgtctatttttccctcgcctgtaattacaagatcggcccctttaatgcgttcagaaaaagacaaagtatctaaaacaatgtcaacaccgctttttaattccgcttttaaaaaggcgcacaggccagctcccaatcctccggccgctccggctcccgggagtgaatcgatttcgcatcccagctctgctttgacagctgcagcataatgttttaagttttgatccaagtgggccgtcatttcactgttcgctcctttttgcggcccaaatacagcggaggcaccgcgaggacctgtaagaggattatcaacatcacaggcggcttcgaattggatatgctttaattttggatcaaggccgctcacatcgattttggcaatctcagctagtgcaccgcccccattttcaatctcttctccagcgcggtttagaaacttcacgccaagtgctgaagccattcccgcgccgccgtcatttgtcgcgcttccgccgagtccgatgatgatctgggacactcctttttccgcagcatccagaatcagctctccggttcctctcgttgttgttaacaggggattccgctgttcaggtggaacgaggtgaaggcctgacgcttcagccatttcgatgacagccgtttttccgtcaccaagcaggccgtaagctgcctttacgggcttcccgagagggccagtgaccgtttgatatacaatatctcctccggtagcgtcaaccagagcctgaacggttccttcgcctccgtcggcaaccggaatattgacgtattcggcgtcaggcagaatctctttaaagcctttttcaatgcttctagccgcctcaagcgatgtcatgctttctttaaatgaatcaggtgcgattacgattttcatggtacctgctcctttttaaataaagaattgaaaaattccaaaaatcaaagtcgagataatcgttaggattaagccgatgaccgactcatatggaatcagctttaaacgttctttcatggccatgaatacgctgcctcccgtcgtatgaaaaaagcttccgtgaggcagatggtcgagcaccgttgctccggcgtgaatcatcgccgcacctgcgaggccggcgacgccaagatcaagcaatgtcgggccgaatacgctgctggcgacagcggtgccggcggttgtcgaggcggttgccattgacatcagcatgcccgagattggagccaagagaaacgacggtagacccaagccgacaagggtgtcggtgattaaagaattaagtttggagttggcgatgatgcctgcaagggttccagtcccgagcagcatcacggcaacgcctgacatctttgacagtcctgaagcggcaaaatccctcagtttgcccgcttgccccgatgcgatcgcagtgacgaggcctccagccggcagagcgataatcggatcaatcgtaattcctgccgcaggccttaaggcgagcaacaggatagagaccacagggccgctgaccgccgcccaaaatgccggcagttgttgtgccgtttgggtctcaatctcatttgcagctacttttgttcctttatttgaaaggcgttttgccagcaagtaagtggcgcccaatccgaaaatagcggggatgatcccggcggccatcacggatgtcaaagggacgtgaaaggcatctgaagcggcaatggcattagggtttggcgacatgatattgcccgcttttcccccgccgatcatcgccaacagaatggccgctttgctgataaaggtccgcctcgcgatcgccagagcgatcggagcgactgtgatgacggcgacatcaacgaatacgccgaccgttgttaagatggctgttgccaatgttaaggcaagaagcgcccttttttctccgatctgattgacaatggtttccgcaatcaccgctgcggagccggattgaatcagaacgccggcgagcacgcctgccgccaagatgcggagcaccgcgggaatcatgtttttagcacctgctatcatgagatccgtcgtctctattaaatctgcgccgccgattaagcctccggccaatgcgccgatcatcatgccgtaagccggcgggacttttttcagaatgagaaagattgatatgactaatgcgcataaggcgcctattgcattgatttgaatatccatgtgcataccctcccttacgtccaattgtaaacgctttctgtatgagggagaattggtcaggtatacggatttcgtccttttatcctatatttaaattgttcatttgcacaaaagggtgaaaaaagagtaatggctgtatacagtttgaataggtcgtcaaaccgttttggattacaccccgttgccaattcaatctttctgagccggtagtttaaggtgttgcgatgaataaagagtcttgatgaagtttccccgatttcgccgttttcttctatgtagcagaggagggtatgagttaattcgcctttttgatctgcttgggaaaggcgatcccagatgttttgaaagtgaatctcctgatccggatgctctatttttgataataaaacaggaatcgcaaactctcgataatcgtataaactacaattgttttcagcaatcttgagcgtttgttttgcactttgataggaaaatggcagctgctgaagctggtcagcctgctcgccaagcgcgcctctgactgttttccattggctgagccagccgttccaagctgaaaagagatcagacctgcttttagtgggggcgcctgccagaataactgcgacctcttttaaagaaatattggcgtacaaatctttcgcggttaaatgtttttcaagttttttaataaacgccggcttcatatcagccgatgggagctcaaacacaagacaagtacgctggccgtcaagcggtatgtttaatcgctctgcacgttcaaagaagtcaagggatgctagatcagtcccctgaatcatttggatgaccgtttcttcgcggagcctttgatcccatgtcagctgttttgttaaaaatgcctgttcgactgttagctccgctgccattttgacaagttctccgtaacggctgacttcagaaggcggccccgtgattccaatgacgccgattatttcatcatgaaatacgatgggaaggtttacgccgggcttcgttcccgttaaagccgagcattcttcgggcgtgatgctgataaccttttcagctgcaagtgcgtccttcgctcctgcgtgttcatcaccgattctcgaacggtctcctgaagcgatgataaccccgttttcatccatcatattaatgttgtgccgaataatcgacatggttctttcgacaatttcctccgccaattcttttgataggtaattcatttcatcatgctcctgcctaagatcgttttttaaatggtgattgttccgtcgatccagccttttatgaatgattttaaagaaggtgcgacccatattcggctgtcgtctatatgattccaaacataaatatcatttttccgtatggagccgtttaaaatagaataagcaaataaatcgccattgcccgcacctgctataaagagcagacaatcaaacggcttaaaacagtcggtacatctcatgtctagattctcttctattattctgtccgcaggccaaatgagatgatccccgaaagtatcattaatgccgtttgtcatttttaaaaggctgaccagttcatcaggaaaagagacgccgaggagttcttctgctttctgaagctttcctgtttcaataggtctgttcagcgtgtaatcttgaggcaaacggcttataaaatgtttccacaatgccatcaccctttgcgtttattattatttttgcatataatgagaagcgtgaacaataaaataaattttttataaaaaaatcccttgacttaaaaagataggacatgttatattaattcttgtcgatacggaggaatacccaagtctggctgaagggatcggtcttgaaaaccgacaggggtgtcaaagcccgcgggggttcgaatccctcttcctccgccattattgatttgcattttagtgattgaaaagcataaattggagattgtgttgccgctgcctggatagggcagcggttttttttatatgcagcaaaaagagcggctcttcaagggaatccgctctttttgcttgtttatctttgaatggcttcactgattttttcaatgattggatcgagagaggctgagttgttgaacaggtcgtattcatcaatattgactctgacaaccggacaggcgttaaatccgctgatccagttttcatacctagtgtacatttcttcccaatacgatctgtcggttaacagttccatttcccgtccgcgtttttggatgcggtcgagaatcgtttccaaatcgccctctaaatagactaaaacgtcggggcgggggaagtaaggcgtcatgaccatcgcttcaaacaggctcgtatacgtcttatagtcgacttttgacattgtgcctttatcggcgtgcattttggcgaaaatgcctgtatcttcataaattgaacggtcctgaacaaatccgccgcccgattcgtaaatgtatttttgttctttgaagcgctctgccaagaagaaaatctgcaggtgaaagctccagcgttcaaagtcttggtaaaaagcctccaaataagggttattcacgacctcttcaagagaggttttaaatccgagcctttttgcaagctcttttgtcaatgtggatttccccactcctaccgttcctgcaacagtaatgatagcatctttcggaatatcatatacactcattctatatactcctttacttgatcggcaattcgattgaaaacggcttctgagattacgaagtcttcctgatctccgttaatttcaatgacgggtattggcggatcggattctttaaattgcttaatggccgcctcataatcattgataagctgttccaggtattgcttgtccatttcttgttcaaacggccgtccgcgttttttgatccgttccaataaagttggaagactcgctcttatgtaaatgatgacgtttggtttcggcagatcttctgtaagcagctgataaatttttctgtatttctcaagttttttgccttccagcgtccgttcggcaaaaatgaggtttttataaatatgatagtccgaaacaacgggcatgtgatgatgcaaatactttttctcggtatcttcaagctgcttatagcgattgcagaggaaaaacatctcaagctgaaagctccattcatctttttcatcataaaatttatcaagaaaagggttttcttcgacgatttctttgaccaaagagagtgagagcttttcggagagcatgctggccaaggttgtttttcccgcgccgatggggccttcgacagcaatgaaaggggctgtattcataggtgtcctcctactaaagaaattcatttgtgaaccatacatattgtatcacatcatcatccgctgccatgaaaaaaaacgttcctttaacttgggaacgtctctttcacaacattaaattgatcggctatcaagagccagttttgcgggaaggacaggccgagcttccaatagctgattccccttaaattcaattccctaatcagatcaaactttgcctgaatcgagcgggcgtcttcaaaccatacttcatgctgtttgccggcattgtccgtatagcggaagtttggagcctgagctgtttcatcgtactgtatcgccgcattgttctcgctcgcgatctcaatcgcccgctgggggctgattgctctggccagcggtccgcctggcgtataggggagcgtccagtcatagccgtacaagttctgtcccatgacgattttgctggcgggcatttccgtgagtgcgtattcgatcacgtcccggacgggcccgatcggcgataccgccatcgggggccctccgctgtagccccactcatatgtcatcagcacgacgaaatcgacaatttcgccgtgggcccggtaatcatgggcttcataccattgtccgggctgatccgctctcgttttcggagcaagcgcggttgagatgagccagccttcctgcctgaagcgggcccgggcatcccgtaaaaactgattataggcttctctatcttcgggccttaagtattcgaagtcaaaatggatgtctttaaaaccgtatcttctggccgctgcaacgatgttatcgagcaatctgttttttacattctggtccgtcagaatgatcctgccgagttcgtcgctgaaagcttcattttcgagattggtgacaatcatcatcatcgtagtccgatgtctgtcggcaatttcttttaagttgttcagcggcggttcttcgagtgtgccgtcccgcttcgcctggaagctgaaagcgcccagataggtcaagtatggcgaagcctctcttgccgcctgctgcaaagcggggcttacgctttctccccgaggttcgatataggcgtttgtttcaatgttccgtcttggccgaggggggatgtaaagcagcagtccgaccggtaaaacggcgctaacctgaatgcggttgatcctcgccagttcagccggagaaatattaaagcgtgctccgattgatgctaatgtatctccctgtctgacctcataaaactcgccggcgatcgggatcacgatggtttgtccgacaacaagccgattcgggttcggaatttcattcgtcgcgacaatttcattaactgttgttcggtaacgattcgcgatttggtaaagggtatcgcctcttttcacgacataaatctgaatgggaaacgcctcctttctcattgctaccactatatgatgaaaggaagtgtttcatgctctaagtttcggaggtaatcgccttagccgtcgtgatattggcgaacagaacattttccatcatcgtcaaggcgtatttgttgtctttttcattgtttgaggcgatgcaatcgcgcggaatcgtaatctcgtactcccgcatataagcatcgtttgccgtaaataatacgcagatattgcctgcgatcccagtgatgatcaaatgatcgacatgaagttcatgcagcaatgtttcaagagcagtgccgtaaaaggctgagtgctttggtttgattaaaaaataatcgctgtcattcggtgcaagccggtcgatgatatattcgctcctgccgtttttgcatttcttgataatggcagcaatatccgcttgccaaattccaaaatggtcattaatgtatatgataggccatttcattttggctgcgtgttcttttaatgccagaagatgctcggtgatatttctggtctttttggaaagaacgtcacccatatcgaattgaaaatcattaatgatgtcgactataatgagagctgaattggacaatgcgattgtctcctttcagattttatattcctttaactataagttagcctattcagtttggcgaaaaacattgaaagagtgcatgcggatgacacaagacgagttttatatgaaagaagcggtcaatgaagcgagaaaagccgaagaaaaaggcgaagtgccgattggtgctgtactcgttctggatggggaaattatcgcccgcgcccataatctgagggaaaccgagcaaaggtcggttgcccacgcggagatgctcgtcattgaagaggcatgccggaagctggggacctggcggctggagagagctgttctttacgttacccttgagccatgtccgatgtgtgccggagcggccgttctttccagaatcgacaaagtggtgttcggagcgtctgatccgaaaggcggctgtgcagggactttgatgaatctcctgcaggaggagagattcaatcatcaggctgaagtcgtgagcggcgtaatggaagaagaatgcggcaggatgctgagcgattttttcagaaagctccgcgcgaaaaagaaagcagaaaagcaaagcgagctgtgatgacggaaatttgcaatttaggatgaaacaagttatactaatgagtgcgtcacatcaagacgcagcttaaataatttgatatttattttgccgtgctaagcggggaggtagcggtgccctgtactcgcaatccgctcgagcgaggccgaatccctttctcgaggttcgtttactttaaggtctgccttaagcaagtggtgttgacgcttgggtcctgcgcaatgggaatccatgaaccatgtcaggtccggaaggaagcagcattaagtggaaccttccatgtgccgcagggttgcctgggctgagctaactgcttaagtaacgcttagggtagcgaatcgacagaaggtgcacggtaaatcaatcatcaaattaagaactcatctatttgaatatagatgagtttttttcttaagaagagcttttggatttgaaagccgcatcatgtataatggaaatgatgaaaacaagaggagggcgtgtttgtgagttaccaggctttatatagagtgttcaggccgcagttgtttgaagatgtagtcggtcaggagcacatcacgaaaacgttgcaaaatgcccttttacaaaagaaattttcgcacgcttatctgttttccggaccgaggggaacgggaaaaacaagcgccgcaaaactgtttgccaaagctgtcaactgtgagcgcgctccggtcagtgaaccgtgtaacgaatgctccgcgtgcaaaggcattacaaacggttcgatttcagatgtgatcgaaattgacgccgcttctaacaacggtgtagatgaaatacgcgacatccgcgacaaggtgaaatttgccccgtctgccgtcacgtataaagtatatatcatagatgaagtacatatgctttctatcggcgcattcaacgcccttctaaaaacgcttgaagagccgccggagcattgtatctttattctcgcaacaacagagcctcataaaattcctttaacgattatttctagatgtcagcgatttgattttaagaggattacctcgcaggcaattgtcggacgaatgaaaaaaatcgtcgaagctgaacagttcaaggtgcaggacggagccttagacatcatcgccagtgccgcggacggcggcatgagggatgcgctgagcctgctcgatcaggccgtatcattcagcggagaagagctgacggtggatgatgcgctgctgataacaggcgccgtgtcacagcactatattggaaagctcgcctcaacccttcacgaaaaaaatgtttccggtgctttggaaacattgaacgaactccttcagcaggggaaagatccggcaaaattaatcgaggatatgattttctacttcagggatatgcttctttatcaaacggcgcccgatttagaaggcgttcttgaaaaggtgaaggtggacgaagagttccaaaccctatcccggcaaattcccgcatcagacctttacgaaatgatcgatatattaaataaaagccatcaggaaatgaaatggacgaatcatccgcgtatcttctttgaagttgcggttgtgaagctctgccagggaccaaaagcaggggcatccgcggccgcccagccggaagtggacaatctcgtcaacaaggttcggcagcttgaacaggagattgagaggcttaaaacacaaggtgtgcaggtctcttctgctcccgcccaggctaaagaagcgtcccgtccgcaaaaaagcataaaaagcgcgtataaagcgcctgtcggccgcattcatgaaatattaaaggatgccacaagaccggatctcgaaaaattaaagggctgctggggacaattgcttgcccagctgaaacagcagaataaagtatcacatgcggcccttttaaatgacagcgaaccggtggctgcatcttcaaaagcatttgtcctcgcattcaaatacgaaattcactgtaaaatggtagctgaagacaacaacggagtcaggacgaatctggaacaaattttggacggaatgctcggcggaaggatagatatagttggcgttcccgaagcccaatggggtaaaataagagaagaatttttgcaggatcaccagccggaagattctgaagcaaacgaaccgaaagaagaagatccgctcgtagcagaagctaaaaaactgttcggagcggaactgattgaaattaaagaataaaaacatgaaagagagtggatttgagtatgcgcggtggaatgggtaacatgcagaaaatgatgaagcaaatgcaaaaaatgcaaaaggatatgcaaaaggcacaggaggagctggctgaaaaagtactcgaaggtactgcaggcggtggaatggtgaccgttaaggtgaacggccaaaaagaagtcatcgacgtcatcatcaaagaggaagtcgtagaccctgaagatgttgaaatgcttcaagatcttgttcttgcagcgacaaacgatgctttgaaaaaagttgacgaagtaacaaatgaaacgatgggtaagtttacaaaaggaatgaacatgccgggtttattctaggaggaaaataagaatgcagtatcctgaaccaatatcaaagctgattgacagctttatgaaattgccaggaatcggacccaagacggcggtccgtctggctttttttgttcttagtatgaaagaagacgtcgtgttagattttgcaaaagcattggtaaacgcaaagcgcaatttgacatattgctcggtctgcggacatataacagatcaagatccttgctatatttgtgaagatacgagaagagacaaatcggtcatatgtgttgttcaggatcccaaagatgtcattgctatggagaaaatgaaggagtacaacggactgtaccatgttttgcatggagcgatttctccgatggacggcatcggtccggaagatattaaaatacccgaattgctgaagcggttgcaggatgatcaggtgactgaagtcattctcgcgacaaacccgaatatagaaggagaagcaacggccatgtacatttcaaggcttttaaagccgtctggtatcaagctgtcacgaattgcccatggacttccggtcggaggcgatttggagtatgcagatgaagtcactctttctaaagcgcttgaaggcagacgtgaaatgtagagggaggagattgcgttaccatgggttttcttcggaaaaagaagcttagaaaagaatttgataacaagctggttgaacagctgatccatcaaaaggaagaatggaacaggcaaaagcggctgattgaaaacagcctagagccttccccagaagttctttacgaattaaaggttgccgaggcaaagtactttttttatttgcgggaagcaaaaaaaagaaatttaaggatcggcagctggaagtagcaggtctatttgcatgattcccatcatatgcttgtacaagaacgagcgaggagtgagggaattcatgggatctgttatctttatcggggcaattgtagctttggttgccctgttgtttttttcaaaagcatcatttaagcctttgcgattaatcggaagaatagcggttagatttgtagtcggcgctttgtttttgttctgtgtgaatctgtttggcgagagcgtgggcattcacgtgccgattaatattgtaacaaccggagtgagcggattattgggggttcccggtgtagcagctcttattgtcattaaacaatttatcgcaatataattttttgttgacaaatatatttaaaggtgttaaattaatatttgtcgctaatgacgaataattttttgaaaaaaagttgttgacgacatcacgattaaatgttaagatattatagtcgctttgagagcggcaacgaagttctttgaaaactaaacaagacaaaacgtacctgttaattcatttttataaatcgcacatttgagtaagcagcacgcgcagcgactggttgtcgagctccatgaactgttcgcacaactgtgtcggcaggaacgtgatcgtaatcccgttctcttcgaaatattcattcaaacgcgtaatgtccatccggatcgcttcatcgatgatatgaagctccgctccggcgatccagtacgggaacatctcccagacggaagcgtcaaagccgaagccggcatatttcgcgcttttgtcctgttcggtgaccgtgaatgcatcgttatgccaatagcacaagttcacgagcgattgatgttcgaccatgacgcctttcggctggcctgtcgtgcccgatgtgtaaatcaagtatgccaggttgtcagactgagcctctgcgcttggattgatgtcatcctcgggataaagctcgccggccagaatggaggcttctctattcaaatcgatcacttctccggtaaatgcgtccggcatcgttaatccgctttgcgtcagaagcagttctgcaccgctgtctttcagtacgtatccgatccgctcggccggatagccggggtcgatcggtacataggccgctcccgctttcaaaatcgcgagcacgccggccgccatttccagcgaaggcttcaccatgatcccaacccgctgttcagggccggcccctttttcgatcagcagccgggccagacggttggcgcgcgcattcagctctttgtacgtccactgcacgccgttgtacaccgctgccccgcggtcaggcgtgcggaggacttgcgcttcgaacagctcatggactgttttgttctgcggcacgtcgagaactgtttcgttccattcgtacaagatccgccgtttatcggcttcatccagaagcgaaaggtctgaaaggcttgcatccgggttttcggcaatcgcttcgagcaggttaagcaaatatccgctccagcgttcaatcgtttgttttttaaataaatctgttgcatattcgaactgaagaccgatttcatcatctttttcaaaagcccccagtgtcaggtcgaacttggcagcggcatgtgaagtctcatacggcttgattatcagaccgtctaaatcgagcgtttctttatcaggatcttccgttgtcagcatgacattgaacagcggattccggctcatatcgcgcggcaaatcaagcttggcaatcagctcttcaaacggatagtcctgatggtcgagggctgcgaggctgttgtttttcacctcttccaaaaacccgctgaatgatgcttgatcaggtacatggtttttcagcgccaacgagttgacgaacatccccggcacgtctttcaaatcagcattcgttctgcccgctgccgctgagccgacgacaatatccttttggccggcaagacggcttaaaaacagattaaaaacggcgagcattacaatattcagcgtcgtgttcgttttcgccatcaaacggcggattttaagggcggtgccttttgatactttaaagtgaacccggtccccggcaaagctttggacaggaggacgcggaaagtcgagcggaaggctgagttccggaacggtttccttaaactgccggagccagaagtcttcctgtttccgaatgttttcttgctggtcaggttgttgctgccacaccgcataatctttataatgcagcttcggttcagggagcgaagcgcctttataaagctgtgcaatttctttgacgaaaaggcttctggaaacgccgtccgcaataatatgatgcgtatcaatcaaaagcagatggcgcgcagagctgatggagagcagctcggctctgatcagcggagcggtgctgagatcaaatggtctgataaagcggttgatctgtgcttctgcgtcctcttcatgaatatgaataacctttaagtcaatgtccgctttttcatgcacaatttgaacggtgcggccatcgatttcaacgaatgcggtccgcaatgattcatggcggttcaccaagtctgcgaatgcccgtcttaagcgatccgtatcaagtacgccttccagcatgagaacagacggcatgttgtagcccgttccgttcttttcaatatgatggagggcatacatccgttgctgagcggatgaaacgggataccagtcgcgtttttcggcaggctgaatcccgctttgttctgcctgtccatcggcttcgatactgcgggcgagcaagccggctgtcggacaatcgaacaacgtttttaacggtactttttttccgagcttggattggatttccgctgtcagcatcattccttttaatgaatgtccgccaagatcgaagaaattgtcgtcaagtccgaccggccgaacgccaagcacctcctcccaaatgccgcagagggctttttcaaattcggttgacggcgctctatatgaatcgctttgaccacttagaccttgcggctccggcagcgcgctgcggtccacttttccgttcgccgcaagcggcattttatccaccgttacgaaatatgacgggatcatgtacgacggaagccgctcagaaagacgctctctcatttcggaaaccggcagctgtcgtttcgcttgaatataagcgcacagttcgtctagccctgagtcagccgtaaatgaaagaacgaccgctctctctatatgttcaagtccaatgaaggcctcttcaatttctttcaattcgattctgtagccgcggattttcacctgatcatccgtccgccctaaaaattcaatctccccattcggaagacggcggacgagatcccccgtccggtacatgaatgtgcccggtgtgtaaggattttcgataaacttcgcagccgtaagttcccggttgttcacatatcctcttgcaagcccgcttcccgtaatatacagctcgcctgccgctcccgcgggaacaagccggcgggaagcgtccaataccagtgctccggcgcccgaaatcggccgtccaatcgtcgggcgctcggcgaattgccggatcatgcccggttcgaccggtttagcgatggcaccgatcgtcgtttccgtcggcccgtaatgattgatgaaccgggtgtccggatagcgggaatggaaccgttcgacatctttcggattgattttttctccccctagtacaatcagtctcaatgactgaagcccctttgccaaagcgaagctttgcggctgaacgaccgtatggaacagcgacggcgtcagcttgatatatgtgatcccttgttcaccgatataatgaataaatgtctccggttctgtatacgtttctttccggacgatatggagctctcctccggcgagcagcaccgggaaaaggctcgtgtagccgagatcgaacgcataggaagacaaaagcatcgttttatccgaagctgacaggcgcgcctcactgataaaccaggaaacatagtttgccagattgcggtgttccagctgaacgcctttcggctgacccgtcgttccggatgtatagatgatgtacgccagactcgccccgtcatggattagatgcggtcgttttttgcttgccatcagcgtgtcgtttctcacatctatcaatctcccgttataccaatctgcgagagcagcttgatgggaatgttctgttaagagccagcgggctttgctgtcttccagcatatattgaatcctgctcgtcggcatttccggatcaatcggcaaaaaagcgccccctgatttcattacgccgagaattgccgcggcgacctctgcagaacgatccagcataatgccgacaacgtcgtcttttccgatgccttcacttcgcagcacatttgcaatttgatttgctctttcatctagcccgcggtatgtgaggattgtttccccgcagacaacagccggctgatcaggcatttcggccgccttttcttcaaaccgtacatgaaacggccgctcctctaggcgttctgcccggctgcgcctcacttcttccaggagaagtccgcgctctttgtctgaaagcagttcgatgtcccggagcttaatgccgggattttcgcagattgttttaatcacatttaagaagtggccgctccagcgcctgatcgtttcttctttaaataaggatacggcatagtcaaagctcaaaccgatttccccatcatgctccacggcctcaagcgacagatcaaacttcgctgtgcgatggcgcaccgagtaagacgaaatctgcaaatctccgagtttcagcgtcgggatttccatgttctgcatgttgaaaaagacgctgaacagcggattccggcttgtatcccgcggcaatggcagtttttcaatcagttcttcaagcggatagtcctgcttggcaaagccctgaagacttgtctctttgacttcctgcaaaaattccttaaacgttttttccccttcgggacgattccggagcgccagcgtattgacaaacatgcccggaatgttgtgcagatccggatgggttctgccggccacaggcgatccgacgattaaatcttcctgagacgcatacttggacagcaaaatattaaacgcggccaacaggaacatataaagtgtcgcatcggcttcagaaagcagcttttgaacgtctgccgtcagttttcgattgattccaaagacgacacggtcgccttcaaagctgcgttttgaaggccgcggaaaatcgtacggcagatcgagaacaggcagctcgcctttgaaaatatcgagccaatactgttcctgttctttcaatttctcctgatgctccggcccgttttgccacacagcgaaatccttatagtggagcttaggagcaggcgcctcttcaccgtggtagaagctggccaggtcgcgaatcaatatgccggtggagcttccgtccgtaataatgtggtgcatatcgatcatcagcagatggcgcttttcttcaagctttacgagttccgcccggacgagcggcgccttattcagctgaaacggccggataaaccctctgatcgccgcttcggcttccgcttcatccgccactgattccgtcaggtgaaaaactgcgtcttgatggatggtttgaacgatttctccatcgattaattcgaacgatgtccgcaatgtttcatggcggctgatcaaggcccgaaacgcgtcttccagacgctccttatccaattcgccttccagaagcagaaccgccggcacattgtagctcgtgcttgcttcttcgagctgattgaggatgtacatgcgccgttgggcggatgacaccggataattcgcacgggacggcgccggcgcaatcggagcggttttctctttcgtttccccttgaagaaattcggccagctctctgatcgtcggtttttcaaacaatactttgatcggcacttctttttggagctgctcttgtattttggctgtcagcatcatcgccttcagcgagtgtccgccgatggaaaagaagttgtcatcgattcccggctgcttgatgccgagaatctcttcccagattgccgccagaattttctccgtttcatttttcggcgcttcgaatctgtcagtctcttcagcgataggagccggcagctgccgtttgtcaacctttccgttggctgtcagcggcatgctgtcgagttcgatcaaatgagccggaatcatatactccggaagcgaccgggacagctctgtccgcagctgtgcggccggcctcgcgccaactgcagtgtagtaggcgcaaatctcggtttctccggtattgttttcccgaatgacagcagccgcttctgaaattccctcaaggcgggccaaagccgcttcaacctcgcctaattcgatccggaagccgcgaaccttcacttgatgatcgatccgcccgagaaattcgatattcccgtcgggaagccattttgccaagtcgcccgtgcggtacatccgcttcccttcggcaaaaggatcgccgacaaacttttcatctgtcagctcaggctggttcaagtagccgcgggccaccccgtctccgccgacacacagctcgccgggcacgccgatcggctgaagcgcgccgtgttcatcaacgatataggcggttgaatttccgatcggctttccaatcgggatcgttctctcatatgcttgatcgatgaaaaaacacgtcgaaaatgttgtattttcagtaggtccgtatccattccaaagcgagagttccggcgattcgcgtttaactctgttgacgattccaggaacaagggcatctccgccgataatcagatcatttagggttgcaaacattcccggatcctgctgggcgagctgattaaaaagaggcgaagtcagccacattgttgtgattccggtctcttccaggaacactctgaaccgctttccatcaaggagcgtctctttcgggacgggataaagggttcccccgtttagcagtgcgccgaacacttcaaatgtactggcgtcaaagctgacagcccccgtctgcgccatcttcacgtcgctcttcagcgggatgtagcccgcatttttgacaaggcggacgatattgcggtgttcgaccatcacgcccttcggcttgcccgtcgatccggatgtataaatgtaataggcaagatctccgggtttgttggcatgtacaaggttggcggcatcttctttttctgcatccaccgcatttgcggcgagtacctcatacccttccagcgaaatctgcgggctgtcttttgtaaggacgatctttgctccgctgtcttcgagcaagaagcgaatccgctcttcaggatatccgggatcgatcggtacgtacacgcctcctgctttcagtaccgccagcatgctgacggctgcttcaagcgaccgctccatcataatggcggcggcatttccgtgcatcaagcctcttgctttcagccttctcgcgagctgattggctttctcattcagcctgcggtaagtcaggcttcttccgtcagcggcaacagccgttttgtcaggagacgcttcaacctgttcttcaaacagctccggaatcgtcttttctcttggataaccggttttcgtttgattaaaagcgagcagcgtttgttgctcctgttttgataacatgtcggcgctgcctgcttttgattcgggatttgcaatcgcctcttctgcaagtctcgttaaatgccctgcggcctgctcaatgaaagccgcgtcaaaagcttcgccgttgtatttcaatttgatcgtccactccgctcccggataaacgatcaaattaaagtcgtaattcgtttgttcaaaagctccggcagccttgatggaaaagccgagccgctcatggatcgttccgctttccagctctttatcaagcggatagttctcaaacgcgacaaggtggctgatcaagcggccgtccaatgccgattgcttctgaatctcatatagcgggagatagtcgtaccgctccgcgtcaattgcatgctgctgtgcttgtttgaacaactcggcaaacgatgcgttttgatcgacccttaaacggacggggatcgtgttgatgaacagccctgccatatgttcgattccgtcaatttccgacgggcgcccggacacaaccgtgccgaacaccacatcttcggatctgttatatttagcaagcactgttccccaaatcgcctgaaaaagattgggagctgtgacatgatagcggtttgccgccttttgaagagcatccaccatgtctttgtcccaaacaaacgtgaactcctcgttccggtacgatcctgaatccggccgcgtttttccgccgggaatgacgctcgggctttctaaacccgaaaggcggtgttcccagtaggatgccgcttcatccttatcctgccggccgagccatttaatatagtccgcatacggttttccctgatcaagcggaaccgtccggtttgctcgaaacgcttcatagttttgaaaaaggcgtttcatcaatatccccatgctccagccgtccatcacgatatgatggttgctccagacgagatggtattttttccggtcaagccgaaagaccgccgttttaaacagcatgtctttcgccaaattaaacccggccgcctgtacctcttgtttataccggtcaatgcgggttttttgcctttcctcatccaagtccgcaagatcctcaaattccactattgcctgccgttcagccaggacaacctggcgcggtttttgcaattgctgatgaacaaaaaccgttctgagaatatcgtatgaacgcacgagctgattcacgcttttttcaaagatccccaaatcaaattccccgtctatgacaagctccagctgtgtgaagtaagaggaagattccggatcaagcattgcgtggtacagcattccttcctgcatcggtgtcaaaggatacaccttttgaatcttttgtttccccataaggcacctcgtttttttgttagaaaatttccatcagtttatctaattcttcaagcgttagttcgtcatctccaagatcgctcggggtcagttcgcctccatccagctctaagcaatgatcgatcaattgcagcaaataagttttaaagcttgcggcgacagcggcgacggtgctttctttgtattcgagtgaatgataggcaattgacattgtcaaaatgccgttttcgatatagccgacgatgtctagcgcattcggtttttccgtttccgggctgagcggatcgccggacggcaaagctgatctcgtgaacagacccgaatccgccatctctgcaaactggcccaaatagttaaagctgatatcatgcttgatcggctgcgcctttttgccttcttcggtcaaatagcgataaatgccatagccgattcctttattcggaatgtggcgcaactcttctttgatctgtttgatttgatagccgatatcttcggaatggcgcagttgaatcagcgccgggaactggcttgtaaaccagccgaccgtccgggaaatattcaagccttccatgatgtcctcccggccgtgtccctccaagcagatgataaagtcttcctgcccggtccactctttcagcgccaagcccaacgccgtaagcaaaatgtcgttcatttccgtgttatatgcttcatgaacttttgtcatcaactgttctgtttcttctttcgagagagaaaactcagccgttttcgtatggtgcatccgtttgtcctctgcttcatcatctttagggagcgatgccgtctccgccttctcgacttcctgccaatagccgatttctttcgcgaaagcttttgaccttgcgtattctttcaggcgagccgcatattcagcaaaagagtgcgtcttttcttgaagaatgatcggctcccctttttcagcttgggcgtacccggcggcgaaatcctcaaggaggattctccatgaaattccgtccacaacgagatgatgaatgacgatgagaagatgatcgccttgatccgtctcaaagatcgccgctttcaaaagcgggccttcggttaaattgatactgctttgaatccggtttgattcctttaacacggcagcttcaagttcagcacccgattcattgaagcggatgacttcaggacgaaccgctgtttcttccagccctctgttgtactgaacaatcccgtctccatttcgctgataaaccatgcgaagtgcatcatggtgttcgatcatcttggttaaagccttgcctgccgcttccgggtcaaaccctgaaggggcgtgaagcataactgattggttccaatgatgctcgttcgtaaatttgcgctcaaagaaccagcgctggatcggcgtcagtgtgacttcgccttcgacagggttctgatcgatcggctgatcgtcagccgcttgaacataagcactgagctccccgatcgtcgggtgctgaaacaagtccttcatctccagcttccaaccgtgctgctgaaggcggcttgccatttgaattcctttgatcgagtccccgccgagcgcgaagaaattgtccgtgactccgattcggtctatgccgagaacatcctgccaaatgtccgccaacagctgttccgtttctgtgcgcggcgctttgtattcggttacttcgaaagttgtttaaacaggcctaaccaattcttcttataacgagcataactaaaccgcttgtacacatccaatgaatttttcgcgaactttttctgtttcttgctgtccaacattaattcaattactttttccgcaacttcttcgtagttattgtattctgttaggtatccgtcttttccgtctctgataagtgtttccggtccgtacttcgtccggtaactaactactggcgtttggttggctagactctccatgatcactagacaaaagccttcaaaacgggacgtcataatagacaatccatgtttttggatttctctattaacgttatgggtgaacccgtgaatataaacattgttttcgagttttaactcctttattaacgcttgtaaattttctttctcttttccataaccaaagatgtgatactcggcttctttaatagtatcgactacaatacggaaagctcgaattccgtccgcgatatttttgctgtcctccaagcgagctagtgttatggctgatttaggatttcgctcaattgattcatctagtatttcatctttgtccaatgtgaccgcatgaggaactacaacaaatcgtttatccttaccgtagtcttcctcgacatcccttttttgttcttcagttaagaaaacaatcgcatcgaattcatccctgtgatcaaatatctctttatacacgcgcctatatggagatcctttaacgtgtggcttatcaagatgcgtattatgcaaggttacgattttataacaatcgttgctcaccttacggaaaacatctagtaatcccaattcatcaagcattaaaaacggattcgtgtaatcttttagaacagactcaacccaatagacgtgcgcatcagttatatgattaaatgctttgttaattccagcgtgaataacacacttcgttctcttccctgaagaatttacccaaacagataaataacattcctcattaatatcataatatttttcaaacgcaggtttgttgttctgaaggttgtatctaatctcacgtctctttctgccgttaagatcatactcaactctatgggtacgttggagattaaggtcacgataatcaatgaacttaagtctcatttcttcgtcgaatagtttgtactttacatagttcccgtccttatcatagtacctgtagccatttgtattagggcgttcatctatatagtgagaaagcccatcctcgaccaacccaagctcaggagatttatccttattagagatgcgctcaggtaagttgtagaagtgctcgtgaaaattgtatacctcgatattctccgcgagtctccctctttctttcatcctagagataatgtgttcgtggttattttgaaaattaagagttagaaacgagacttctccccgctctgtagcaaccatattagcacgtctttcggttgcgagagccattccggatctaacttcgtctaagaaatcaataagtataaaattatgattcatgaaattctccttagtaatttattactattagtatacattaaattcgaatgcaagtgttactgtttacctgtccttttctatttcgataatttcccgaacatcatcaatctcaaacgtatttacaattcgttctaagtggtcgattgaaacgcggacaacatggtttcgagaaagttgcgaaattgcggctggtctgatcccgaccttttcggcgaattcaccctgatttagtccgtagcgatccattagcttatcgattcgtagaactactcgtctcatcgttctgcctccaatcgttttatttaattataatgcacgaaagtgttttcgtaaatacgtaaaaaagaaatttacgcaaaaacgaaaataatcgttgactagtattacgtataaacgtaaaatacgtattaacaaatgatacgtaaaggcggaatcgttatgcattatttagcggaacaccaaacgttcgcttcgacggccgaactcaacgcggcagtctacgaacacatcaagcgcaatacatacgaactaaacgacaccgaccggctcacgctgaagacgatcgctcgctatgcggtcaagttcgccggcgcagcgcatctcaaagcggaaacactcgcggacataatcggtaagtccgtcaagactgcgcgtcgtgccgtcaacaaactcgcatcactttcgatcatccagaagatcgcaacaactcggaaaataaacggtggccacggcgcaaatattatcgtcattctcccggtcggaagaagagtcgaggacacgcaactgtccgaagatgaccagtcgacaatgaccacgcgtgaggatgccgaaaagccaacggagccaacggatgaagcgcctaaaattacgaatgaaccatcggattctataaatctttcaaaaaatcacgtaatagatacggtgccggcctgcggtcttaaaaatgcgttaccaagcgaaatctactccgcaatggcgcgctacttcgaagcagacgaaatttataaatactacggaatcttattgcgggctaaggcaagcgtagatccgacactgatactcgaagaacatccgcagccattcgttgaagcgtggcacgcagcgattctgaaacgaaaacagcagaaaattagacgctttgacgactacctatacgctagcttccgtcaggccgcatggacgctaaaagcccgtgaaaatcgcgttaaaaacgttgggctattggcggagttcgaatcgttcctccaagcggaatagatttgctcatcgcaatttgcgaagaccaaacgcattagtgcgtacgatttttattttacgaaacttaaaaacgcacctataacggagacagaacgttgataattcgcgaatttaatacttcgcaaaaaatttggtcgtgcgtattgacacctacgaaataccgtgatatattagtattcgtcggtgacgatccggatgcgtacgattgacatagcgcttaatatggcgcgcgataaccgtatatcaaacgaatcatacgcacatacaccgaatcttacgaaacggtatagtgtccgatcgcccaacacacatgccggtgtggcggaattggcagacgcgcacgactcaaaatcgtgttccttcgggagtgtcggttcgaccccgaccaccggtatcactaaacatcgtattgccaaacgatgaaagagcgttcctacaaaaggagcgctctttttatttattccttatcttggaacgaagccgtaagaattttttcttaaggactgcgagctccggaagctacgggaacataccgtgagatttatcgaaatgagcttaatacggtgcagaaacttttacaaaagcaaaaatatatctgatgatttattatctatttatagggcgaaaagtaaattattgatacaaacttctttgcaaagattggtaactttctgtaaaatgttctcatagcgatagaggcagtaaagtgtgggaggtttgacaatgaaagcagcagcctctgtgaacgtagccaatctcatcaatcagtggtatgttcacataaaaaagagagatgtttcaaatgccgtagaacttagggacagaataaaaggccttttaaacgtaatggaagaagatcaggatgttttgctttactttaatctacttgattacaggttcagagtattaatggaagacgtcgcgggggagccgcagcttccgcctattgctgaagataaggcgaagacagacggtttgttacgatactattactttctctttaaaggaatgtatgaaagtgcgaggagcaactactctaaagcgcttaattgttttagagttgccgagcggcagctcgataatgtcgaagatgaaatcgaaaaggccgagtttcattataagcttggaaatctctattattttacgaaaacaactctactttcttttcatcatctttcaatcgcgaagagcatttatagggcttatgaagaatataagacacagtcgataaactgtacggtgctgctcgcactcaattatatagacgacggacgtttaacaagagctgaaaatatgcttaagagttgcgcagaaagactgatcaagatgggcgataatcatctgctggcggctgtctactatgatctcggctttttaaaaattcaagaggataaacatgaagaagcactcgagtatttcgacctctcatttaaaacggatgatatcgaaaaaaatgcgcctattatgtacatgcagtgcatatacgagtcagctaggtcaacttataagataggtgaggttgataaggcgcttaagtgggttcatcttggttttgagtttgctcagaaaacggataatatcaacttttcgctcaaattctcgattctaaatatatgctatagcgctcccatcgagggtgtaccgcaagtaaaagagtttatcgaaatgctcgaggagagagaggcttacgtagacattgaggcgcttgctgaggatgtggccaacgtctacagctcattaaataattacaaatattccacataattcttggaaaaagcaataaaatcaagtaaactaacaggaaaggaggttctttaaatgaaaaaacttattgtaactgctttccttactgcatcgcttggactcgttttaaccagcgcagcagacttcctcgcagaaagtatccaaacagcagactcagtaacattacttgcctcaagaggagcgggctcataaaacaaaaatacaacagtaagagggcggctattacagccgtcttttttatgatttcagttttcttggtaacttgaatgctatactatagttatatctaaaatgcgaagttaacgctatgctagaccgtaatggcttattatatcgaatataccgcgggctagggctttccgatagaatcggcacgactcaaattcgtgttccttcgagagtgtcggttgaccccgaccaccggaatccttagctctttttaaagaattggatagaaaacgttatgatttgaaatggttttgcacattctttacacatacacatcctcaacttcttcaggcttttcaacttcctcaacagcctatcttcaaaaatgtttactgtctcagtttcatctctttcccgaagctctttaattaagtgagcatatgtatttgacgtggtttctatatcagcatgtcctaatttcacttacataataaattgacacctttctataaagctgcacgcttgtgagtgtgccttaatccatgaattgtagtcggttgaaatactcaatttcgctagtacgccattctatattcgggattcaaacggtgaaattggtatcgcgcgccggcaatgtacaagtgaatataaaatacagcctgtaaacagggaaattcgcttgttgcttggctacaagctaaggcagctcataaaagaagtagtacatctttgtaaagggatcagcactgacgagactcaaagagttaagccgagtcgggaatgctggcagatagctgagcatccactggttgatgtggctttcatagatcgatcgcgctacatcacttatgttgaacgcgaggggtttataacacatgcaaaatctaattgtatcggctgtcctttccatgttttcaatacatggcaaaatatgaatataaaagatccagtttcatggaatgacgcggtggaaatagattgactcatcaggcggctcccgcactttaaaaataatgcttttcttcataagtccgggaagacggtggaggaagttgatttcaacgagaattagctcaacattgatcactttttgaatgaatttgaggggatgttggtgttgatcgaatacagctgacgtgagtaaaaaggcctgctgttccaactatgggtgcagcaaggggcattgaggaggatatcatatcttgataaaattagtaggataaagaaaaagaaggtgttaataagtgaatcttttggaaatctttaatgaattattgagttcttttggagttccgaccgttgttatttttttattttatttataataacagcttttagagtattccagccgatactttgttttcttcagttgtttttgaacaaaagcttttttcaaaggaaagaatgttcattgtcagagcatgtatgtatgtggtttatacgtttgcttggatggtcatttttgtatctttaggtgagacattaaaaaaaagtttaatttggattataacgaaaatttgtctgtacggctgaaatattaattgcagtaaacgtctttgttcttttaactttgaatctagtaaaaaaaccagagcatactttatttaaaataaagtctaatagatacttcaaatttttcatgacttgttcatatttgatttttttattcattttttatactgagatatatttgttgctttctttttctcagtttaatgatgttaaatctttaactgttgggatagtaatgtattttattgcttgtgctcagtgcctatcttttcaacaattgtattaaatacggttgactagtcaactaagaaaaatgtattcatagaggatgaaaataatcaagtttggtatatattgcatccaatcaataaggaagtcattttattgggaaacgaatctgagcctacgctgtgtaatgaaattagaggaactatataaagtacccattaagattgagaaaattaataattaagtccaagatggaatgcctgcggacactgaacttacagcttttacgctgtttgtttggtgtccgttttttatttgtcatgcatgtggttttagtgaaaggagaagaagacatgaaacccaataaaagaaaaccaccttgaaaaaacgcaggagcactctgagcgcttttggcgagagattacggacaaaaacaagcaaattcttaaaagaggcaaaggcggcgcttaattacagagtggttcttctgcaagtaccagatgatcttctgccgaaagtcacggcgggctttaaccatttcctcgcgctgcaagctcgtgattcctaaaaaggatgacgacaagccgaaatcaaaagaggaagagcggttcgggggccggatgtaatgcaagaggtcacctctgaaattctgattgagcgttatgggcttagcgaaaaaatactttccggtgagataaaggcttgtcaaaagcataaatgggctgtgcagcgattttttaaagatgtcgaggtgttagcggacccggattgcccctattattttgatgctgaagcggtgctggatttttacgaatgggcgcggcaggttcagacatgttgaggggatgcatcgggtatttattgccggatgctcacgggagcagacagacgaattttaccaggcaatttttgaacaggtattgcgaaatatctcggcctttgtggtggatcaagcaaccggcaacatcggccccgaaaaagaaagcacgaaaaagcaggagcaaaaaagtacccattccgcccggaatttacaaaagcctaattatgaagggaacggccgtccgacagattcaggaggctttagctgccctctatttctatccggacaaaggcgctaaaaataacggcattgatgtctattacggaacgaagacaaaggcgcagctcgagtcgctattggtttaatacaaaaaggccctctttcaagagggcctagattttataaattccaacgtgtcaattgttattcatcactgtctaattcccatattgtgttaccgtctactaagatcttattcggtgtatcttcataaagagaaatttcaactagggagtttttctcttccaatagccaattatatagactatcttcttcattattaacgggaggagataaaaccttatttacttgaaaagccgttgcgtaatattctttataattgatatcatcatcctccagaccgttgtctgtttcgaaaaatgtatcagttttaccaattactcttaatccattttcccattctaatataagttctctatctttgtattttaataatgttttgaataaagaatcaggttccatgtatatcctcttttcctatatttatttaagacggttgtgaaggtactatatgagcgccgttttttccataatgtatcatgcctcttgtagtctcttcatatttacgggtctctgtattatagtattttactattacttgaccaaaatccactctttctttgtttcctttttttaacatatctcctgtgccagcatatttatcaagcaactcttgcgcttttttattatccccgtagaagatactcttggttctgccatttgcaacttcttgtttataatttggtgttcctggaatatgtttttcttgagctcctggtttaacttttgcagggaaaccatttacttcacggtacggaccttttggtacggattgtttgccataggaaggtgttttatctaccttcgcaactttctttcccgcctcttcacctttaaataacttaaatccttttttcccgtactttagcaaccgaccaacaggtgttaaagaagttccggacgcagcacgctcgacattagagactttttcacctgtgtccggatctctgcctgttatgacccgaaccgcatcattaccgcccgctatttcttttgcaacaaaatcccctatatcatttactggttctaaaggagttccttcaaaatctcgcttaagattcccttggcttcgactttttggaatacgtttaacagcttccatctctactttaccgtttacaatgtactctcttacgatttgaccattttcatatacatggtaacgcccaccgatatatttaatgtctgccggattttgaaccacttcatcggcgacatcaactgttttgacccttttccatcctttatgattatatagtttaccatcaatgacccgaatatctccataaaccttcggatatttttctgcttcgttttgcaacgcattcaaatcaaaatcgttcgcataaacgtcttgattgatattttctttattgtcttccctaatcaccgtatccacattagatcgtttatttttgttgagcttttcaagcatcatctccatcggagacggttcgacattctccagttggccctgaagtccgccaggtagtccgtttattgtagagttatcatccgactttaaaatcgcgcctttttgataactggtgatttctattttgggaccggtatacattttttcgagccttgcgatgtatctctgcatcgtctcaaggtcgttttcagccgtcttcgtagtgattctttttaacggttaagttagaaagggcgcacggtggatgccttggcactaggagccgatgaaggacgggacgaacaccgatatgcttcggggagctgtaagcaagctttgatccggagatttccgaatggggaaacccactgctcgtaatggagcagtatccatatctgaattcataggatatgagaaggcagacccggggaactgaaacatctaagtacccggaggaagagaaagcaaatgcgattccctgagtagcggcgagcgaaacgggaacagcccaaaccaagaggcttgcctcttggggttgtaggacactctgtacggagttacaaaagaacgaggtagatgaagaggtctggaaaggcccgccataggaggtaacagccctgtagtcaaaacttcgttctctcctgagtggatcctgagtacggcggaacacgtgaaattccgtcggaatccgggaggaccatctcccaaggctaaatactccctagtgaccgatagtgaaccagtaccgtgagggaaaggtgaaaagcaccccggaaggggagtgaaagagatcctgaaaccgtgtgcctacaagtagtcagagcccgttaacgggtgatggcgtgccttttgtagaatgaaccggcgagttacgatcccgtgcaaggttaagtttgaaaagacggagccgcagcgaaagcgagtctgaatagggcgcatgagtacgtggtcgtagacccgaaaccaggtgatctacccatgtccagggtgaagttcaggtaacactgaatggaggcccgaacccacgcacgttgaaaagtgcggggatgaggtgtgggtaggggtgaaatgccaatcgaacctggagatagctggttctctccgaaatagctttagggctagcctcaaggtaagagtcttggaggtagagcactgattggactaggggcccctaccgggttaccgaattcagtcaaactccgaatgccaaagacttatccttgggagtcagactgcgagtgataagatccgtagtcgaaagggaaacagcccagaccgccagctaaggtcccaaagtatacgttaagtggaaaaggatgtggagttgcttagacaaccaggatgttggcttagaagcagccaccatttaaagagtgcgtaatagctcactggtcgagtgactctgcgccgaaaatgtaccggggctaaacgtatcaccgaagctgcggactgttcttgcgaacagtggtaggagagcgttctaagggctgtgaagcgagaccggaaggactcgtggagcgcttagaagtgagaatgccggtatgagtagcgaaagaggggtgagaatcccctccaccgaatgcctaaggtttcctgaggaaggctcgtccgctcagggttagtcgggacctaagccgaggccgaaaggcgtaggcgatggacaacaggttgatattcctgtaccacctcctcaccatttgagcaatggggggacgcaggaggatagggtaagcgcggtattggatatccgcgtccaagcagttaggctgggaaataggcaaatccgtttcccgtaaggctgagctgtgatggcgagcgaaatatagtagcgaagttcctgattccacactgccaagaaaagcctctagcgaggtgagaggtgcccgtaccgcaaaccgacacaggtaggcgaggagagaatcctaaggtgatcgagagaactctcgttaaggaactcggcaaaatgaccccgtaacttcgggagaaggggtgctctgttagggtgcaagcccgagagagccgcagtgaataggcccaggcgactgtttagcaaaaacacaggtctctgcgaagccgtaaggcgaagtataggggctgacgcctgcccggtgctggaaggttaagaggagcgcttagcgtaagcgaaggtgcgaattgaagccccagtaaacggcggccgtaactataacggtcctaaggtagcgaaattccttgtcgggtaagttccgacccgcacgaaaggcgcaacgatctgggcactgtctcaacgagagactcggtgaaattatagtacctgtgaagatgcaggttacccgcgacaggacggaaagaccccgtggagctttactgcagcctgatattgaatgttggtacagcttgtacaggataggtaggagccttggaaaccggagcgccagcttcggtggaggcatcggtgggatactaccctggctgtattgaccttctaacccgctgcccttatcgggcagggagacagtgtcaggtgggcagtttgactggggcggtcgcctcctaaaaggtaacggaggcgcccaaaggttccctcagaatggttggaaatcattcgcagagtgtaaaggcacaagggagcttgactgcgagacctacaagtcgagcagggacgaaagtcgggcttagtgatccggtggttccgcatggaagggccatcgctcaacggataaaagctaccccggggataacaggcttatctcccccaagagtccacatcgacggggaggtttggcacctcgatgtcggctcatcgcatcctggggctgtagtcggtcccaagggttgggctgttcgcccattaaagcggtacgcgagctgggttcagaacgtcgtgagacagttcggtccctatccgtcgcgggcgcaggaaatttgagaggagctgtccttagtacgagaggaccgggatggacgcaccgctggtgtaccagttgttctgccaagggcatcgctgggtagctatgtgcggacgggataagtgctgaaagcatctaagcatgaagcccccctcaagatgagatttcccattcctataaggaagtaagatccctgaaagatgatcaggttgataggtctgaggtggaagtgtggcgacacatggagctgacagatactaatcgatcgaggacttaacctaaggttacaatcagtatagagtttaccactatacggaaaccaattggggaataaatcctgttcatccatgaaaatgaatcttattgatcaggtctataaacctaaatactattgtttttgagaataaaccgatcttgattttttagaagctttaatagcttaaaagatcttaattggttttcgaggatggaaaaccatgatataattaccagtaaagcatttttcaagatccaggaggtccgcccttgtttaatatatattgtgatgagagttgccatttagaaaaggataatagtgatgtaatggtattaggagaaatgaaagttgatgctcgttttcttcctgatatctataatcgcattcgtcaaattaaagttaatcatggtttaagctcttggtttgaagtaaagtggacaaaagtttcaatgagtaaaatagacttttatttagatttaattgattatttttttgatactgcagctttaagttttagaagtgttgtagctacaggaaaaaaagaagttagaccacaatacatataatgaaagtgattatgataattggtactataaaatgtattttcaattgttaaacccattcacgacgttaaccgtgtggcgaataaagtcaaacgattccagctgatgaacgatgttttctgatgggatttacggactaaaaatgaaggctaaattgaaccgttactgaagtaatgaaaaaggccctcttttcacagagagcctactttttaaacgaattcatactgacatatttaatcttgttgctgggggttatactgttttaaccattcttttgcatttccacatgcacttagtatatcgtgatggttaaaacttaataaataatcattgtttttattagtgacatagaattcgacattaaacatttcagataatatctttactacattattccccccatcaattttataggaagatttttcatctgaagggttaaacattagaattgcttcagaatctgcaatataatcggctatccattgccaagcatcttggttttgtacagaaaaatctttctctacaaactcccacaacggaaaatgctttttcccattcgcgtatttattagccaaattatgaaatatgatttctgtatcatttgttgataattcatttaccttaatgtcaactgacttagcggcagttaaaatttgttctttaagatcccacatactaactcctccaaaattatctgtttatagggactgagtctactaaaatatgacctctaattgctcctccgccacctcttttcccagcggtttgatatccagtgtgaggaacatccgggccgtttttggtatggccaacatctatattaacttccgccccatttttagatctccattcaacagggaatgattttccattttcgtcttttccccattttgtaactttaaattcttttttaggtactccagttcttttaaaggcttcatctaatgcatctttatatgtcttacctgttcctctaaaatccaagtctataccttttttaaacttgtatcctgttatacttcccagcttagtgtttttttctttggttgcaacgggagcggtcttcttaccaacatctccagctgttttagcccctttatccaccttcgaaacttttgctagcttatctcccttgcgaatccatttgacaatcctcaatggaggcgttaaattaacagcggcctcgaaccgttcaaagagagaaagctttttgtatgtatcaggatcatatcccaatgcagctcgttcaaagtcactttcacctaagagctccaagccaattcttgaatatttctctaaatcacttacttctttatcctctgcaggaggatcgtcaaccaactgtatgccgacgacatatttaccatctaaataataacagtatttatgaccattcacatatttataaaccttttttagtttttctaattctttttcactcaggttttctaattcttcgtcagtatacacttttttggacacttgtgtcgccaatttttttaatcgatctggatcggcgagagtgttaatgtccgcatcttctttgtctccgacttttttcaacatgacacccatcgctgtttcttgatttccactcaaggtatccatctcatccggctttaaaatcgaacctttttgatagccggttatttcaatttttggtccggtatacatcttttcgagccgcgccatgtatctctgcatcgtctcaagatcgttttcagccgttttgtccttcaaaactaaacaagatccaaacgcacctgtctataagaccgcaaggtcttatattccgtataatatccttagaaaggaggtgatccagccgcaccttccgatacggctaccttgttacgacttcaccccaatcatctgtcccaccttcggcggctggctccaaaaggttacctcaccgacttcgggtgttacaaactctcgtggtgtgacgggcggtgtgtacaaggcccgggaacgtattcaccgcggcatgctgatccgcgattactagcgattccagcttcacgcagtcgagttgcagactgcgatccgaactgagaacagatttgtgggattggcttagcctcgcggcttcgctgccctttgttctgcccattgtagcacgtgtgtagcccaggtcataaggggcatgatgatttgacgtcatccccaccttcctccggtttgtcaccggcagtcaccttagagtgcccaactgaatgctggcaactaagatcaagggttgcgctcgttgcgggacttaacccaacatctcacgacacgagctgacgacaaccatgcaccacctgtcactctgcccccgaaggggaagccctatctctagggttgtcagaggatgtcaagacctggtaaggttcttcgcgttgcttcgaattaaaccacatgctccaccgcttgtgcgggcccccgtcaattcctttgagtttcagtcttgcgaccgtactccccaggcggagtgcttaatgcgtttgctgcagcactaaagggcggaaaccctctaacacttagcactcatcgtttacggcgtggactaccagggtatctaatcctgttcgctccccacgctttcgcgcctcagcgtcagttacagaccagagagtcgccttcgccactggtgttcctccacatctctacgcatttcaccgctacacgtggaattccactctcctcttctgcactcaagttccccagtttccaatgaccctccccggttgagccgggggctttcacatcagacttaagaaaccgcctgcgcgcgctttacgcccaataattccggacaacgcttgccacctacgtattaccgcggctgctggcacgtagttagccgtggctttctggttaggtaccgtcaaggtaccgccctattcgaacggtacttgttcttccctaacaacagagttttacgatccgaaaaccttcatcactcacgcggcgttgctccgtcagactttcgtccattgcggaagattccctactgctgcctcccgtaggagtctgggccgtgtctcagtcccagtgtggccgatcaccctctcaggtcggctacgcatcgtcgccttggtgagccgttacctcaccaactagctaatgcgccgcgggtccatctgtaagtggtagcttggagagacccaaataaatgagacaaggaaaaaacaccccctgaatcgtattaatacaatatgattcttaggagggtgtttttctatgggcacaagagtacattacgcagaagaagtaaaatgggaagtaattaaaatgaaacaagctggaatgacaaacaaagaaataatggaacaactggggataaaaaataagactcaaattaaaacatggatgcgatggtacaaaacaggccaaacctatcgattttcgcaacaagttggaaaacaatattcctacggtaaagaatcggaggaaatgagtgagctagaagaattaaaactaaagaataaacagctagaggctcaattggcaattataaaaaagtaccaggagatcgaaaggagttggagccacgagtcattgtccaagttgtagaagaactctcagccacttttaaaataattgatattcttggagtattaggcatacctaagtcaacatattaccgttggaaaaagaagtataaaaaagttgagctaacttcattagaagagctagtaatcaagctgtgtaagaaaaacttctatcactatggtcatcgtaaaattaaatccatcttaaacagaaagtatgggataaatgtaaaccgcaaaactgtacaaaaaattatgcaaaagtttgagattcagtgtcaagttaagaagaagcgacaaaagtacatttgtggtgagagtaatattattgtgccgaacactctcaatcgtaattttaaagcaagccgattaaatgaaaaatgggtaaccgacattacctacttaccttatggctcgactatgttatatttatcaacgattatggacttatataacaacgaaatagtggcttacaaaataggtacgagccaagatattaacctagtattagacacattgagggaagctgtagaattacgtaaaccagtagggttacttcttcatagcgaccagggatctgtctatacttcacatgcatatcagaatttggccaaagaaaaaggcattaccacaagcatgtctcgaaaaggaaactgccatgataatgccgtcattgaatcctttcactcctcgctaaagtcggaaggatttaacgctcaaagtagagcatctatatccaattctaaagtagtacaaattgtaaatcaatacatgtatcgatataatcatgtacgaattcaggcaaaattaaactacctgtccccactggaatacaggggacaggcagcataggtgttttttctaagtctcattttaacgggtcagttcatgttgcacgcaagtgcaaacggaggattagctcagctgggagagcatctgccttacaagcagagggtcggcggttcgatcccgtcatcctccaccattataatattttgttgataaagccggtgtagctcaattggtagagcaactgacttgtaatcagtaggttgggggttcaagtcctcttgccggcaccacttttttatgatataatgtttaagtctcttttaaagagccattagctcagttggtagagcatctgacttttaatcagagggtcgaaggttcgagtccttcatggctcaccattttatgcgggtgtggcggaattggcagacgcgctagacttaggatctagtgtctttacggcgtgggggttcgagtcccttcacccgcattataaaaaaagatctgcggaagtagttcagtggtagaacaccaccttgccaaggtgggggtcgcgggttcgaatcccgtcttccgctccaaccatccacgccggggtggtggaattggcagacacacaggacttaaaatcctgcggtaggtgactaccgtgccggttcaagtccggccctcggcattgatatatgcgcccgtagctcaattggatagagcgtttgactacggatcaaaaggttaggggttcgactcctctcgggcgcgccattatatataacgggaagtagctcagcttggtagagcacatggtttgggaccatggggtcgcaggttcgaatcctgtcttcccgaccattattcggggccttagctcagctgggagagcgcctgctttgcacgcaggaggtcagcggttcgatcccgctaggctccaccatttatttttgaaaaaaagcacttgactatttatatcaagagagatataatgatagagttggcggagacaagctgaagcggatcgaaaaacggaactacacgctcgtcaacaactatgggccgacggaaaacacagtcgttgcgacgagcacagcaatcgatcctgatgaaggcatgctttcgatcggaaagccgattgctaatacgcgggcgtatgtgcttggacaaaacaacgaagttcagcctgtcggcgtcgctggcgagctgtgcatcgccggccgcgggcttgcgcgcggctatctgaacaagccggaggaaacggcgaagcgttttacggaagacccgtttgtgccgggcgagcgcatgtaccggacaggggatgcggtcaaatggctggaagacgggcggcttgagtacatcggccggatcgaccagcaggtgaaaatccgcggcttccggatcgagctttctgaaattgaagtccagctcgcgcggctctctgaagttcaggaagcagtcgtcaccgacatcgaagacgcctacggcaacaaagcgctgtgcggctatgtcgttgcggacgaacagcttgatacagaaagcctcgcccgtaagctggggcagacgcttccggactacatggtaccggcgtattgggtgcagcttgatgagcttccggttacggcgaacggaaaagtcgaccgaagggcgctgcctcagcctgacgtcgaagcgcagacagcaaaaggattagaggagaatgccatgaagactcttgatgttcaggcgctgcacaatgcaatagatcaaacgctggaacaattaaaacaacaatcagacgaaatcgccaaagtcaaaaaggctgttgagggcatcacatcacttgatgatgctttaaagggaaaaggcggcgacgcgatccgcgccttttacgaggaatgccacaccccttttctacagttctatgatacttttatagaggaatacagttccgcgctgaagaaaatgaaaagcgcgctgaattccctggaaccaaaccataacggatttatttcacagtcctttctcgggcatgagttggagaatggcttgaatgccgctgatcgcacaacgaaacatttggtttctaaaaccaacgccacgatcgcaaaagtcagccatattgtcgatttaccggatttgaatgacagcggttttcatgaacaaaatcagaaagcgttaaaggaaatcagcacgactcttgaaaagctccatgcgtttgaccgcgggcaaaccaacgccctaacgcgaggagagaataaaatgtctattattaaacaaaaatacagtgatgtaatcgtagttccgtctggtagcgaattagtttctctacaaagcgagagagacgaactatacctttatttcaacaccacagaaaatcatagctctgatgtctataacattaaattgtatggtgaaacagagaaagaaagcgttcttgggtcaccttcgtataaaggaagtattctgcataaggatgaaatggtgtatgtagcagccgataaaatcggcgaaaatgagatatattaaagaaagaaaaaaactctaccggataagggtagagtttttatttatcctttatccagtctatcgctatgttttgtttacattttcgacagcttgcgttatgttttccgtatagaataatattctttttgaatccgcaacgagggcattcgaactgctcactgcccgtaaatgctccgactaagaagaggagtccgatgccgcctaaacctattcctggcagtataccgataatagtaacgaacaatatttgtgaatcgtctgtccgttatctagttttgagagaacacctctcagaaagccaaaggcaaggaaactcggctaaaggccctcacatcctgtgaggaacgcccagtaccttcgtcctgaaggcatagtttggtggcgatagcgaagaggtcacacccgttcccatgccgaacacggaagttaagctcttcagcgccgatggtagttgggggcttccccctgtgagagtaggacgccgccaagcacttccttcatatgaatcaaaagatgggcctgtagctcagctggttagagcgcacgcctgataagcgtgaggtcggtggttcgagtccactcaggcccaccatctttatacacggggccttagctcagctgggagagcgcctgctttgcacgcaggaggtcagcggttcgatcccgctaggctccaccaacgtgttctttgaaaactagataacgaaagtagacattcacaagaattttctggagcgacaggtccaacaggagtaaccggggcaacgggagccacaggcgcaacgggagcgacgggcccaacaggggcgacaggaccaacgggtccaaccggagcgacaggtccaaccggcgcaacgggagcgacgggtccaacaggggcgacaggatcaacgggtccaacaggagcgacaggtccaacaggagtaaccggggcaaccttcatggagagtttgatcctggctcaggacgaacgctggcggcgtgcctaatacatgcaagtcgagcggaccgacgggagcttgctcccttaggtcagcggcggacgggtgagtaacacgtgggtaacctgcctgtaagactgggataactccgggaaaccggggctaataccggatgcttgattgaaccgcatggtttcgtcacatcctgtgacaacatctgcatgacctgcatcgtgcaggcccctgactacgcacattcgcatgtacgatttatttaatgaattaacaggtacgttttgtcttgtttagttttcaaagatcatt
